(19) United States
(12) Patent Application Publication
(10) Pub. No.: US 2022/0282285 A1
(43) Pub. Date: Sep. 8, 2022

(54) GENETICALLY-EDITED IMMUNE CELLS AND METHODS OF THERAPY

(71) Applicant: REGENTS OF THE UNIVERSITY OF MINNESOTA, Minneapolis, MN (US)

(72) Inventors: Beau WEBBER, Andover, MN (US); Branden MORIARITY, Shoreview, MN (US)

(21) Appl. No.: 17/700,880

(22) Filed: Mar. 22, 2022

Related U.S. Application Data
(63) Continuation of application No. PCT/US2020/052295, filed on Jun. 23, 2020.
(60) Provisional application No. 62/904,299, filed on Sep. 23, 2019.
(60) Provisional application No. 62/915,436, filed on Oct. 15, 2019.

(51) Int. Cl. C12N 15/90; A61K 35/17; C07K 14/725; C12N 5/0783; C12N 9/22

(52) U.S. Cl. CPC C12N 15/907; A61K 35/17; C07K 14/7051; C12N 5/0636; C12N 9/22; A61K 2039/5156

(57) ABSTRACT

The disclosure provides genetically-edited immune cells, methods of generating genetically-edited immune cells, and methods of therapy. In some embodiments, the methods described herein comprise contacting a plurality of mammalian cells with a polynucleic acid construct that comprises an insert sequence flanked by homology arms, wherein said homology arms comprise a sequence homologous to at most 400 consecutive nucleotides of a sequence adjacent to a target site in the genome of said plurality of mammalian cells.

### CROSS REFERENCE

[0001] This application is a continuation of International Application No. PCT/US2020/52295, filed Sep. 23, 2020, which claims benefit to U.S. Provisional Application Nos. 62/904,299, filed Sep. 23, 2019 and 62/915,436, filed Oct. 15, 2019, each of which is entirely incorporated herein by reference for all purposes.

### SEQUENCE LISTING

[0002] The instant application contains a Sequence Listing which has been submitted electronically in ASCII format and is hereby incorporated by reference in its entirety. Said ASCII copy, created on Mar. 21, 2022, is named 199827748601_SL.txt and is 5,341,564 bytes in size.

### BACKGROUND

[0003] Genetically-edited immune cells hold great promise as potential therapies for a range of disorders, including cancers, autoimmune disorders, inflammatory disorders, and infectious diseases. To realize this potential, techniques are needed to introduce desired modifications into the immune cell genome efficiently, while preserving cellular viability.

### INCORPORATION BY REFERENCE

[0004] Each patent, publication, and non-patent literature cited in the application is hereby incorporated by reference in its entirety as if each was incorporated by reference individually.

### SUMMARY

[0005] In one aspect, provided herein are methods of generating a population of engineered mammalian cells, comprising: (a) contacting a plurality of mammalian cells with a polynucleic acid construct that comprises an insert sequence flanked by homology arms, wherein each of said homology arms comprise a sequence homologous to at most 400 consecutive nucleotides of a sequence adjacent to a target site in the genome of said plurality of mammalian cells; (b) cleaving said polynucleic acid construct; and (c) inserting said insert sequence in said target site, to thereby generate a population of engineered mammalian cells.

[0006] In some embodiments, the method further comprises expanding said population of genetically engineered mammalian cells.

[0007] In some embodiments, the method further comprises contacting said plurality of mammalian cells with a DNase.

[0008] In some embodiments, said contacting said plurality of mammalian cells with said DNase results in an increase in the percentage of cells in said population of engineered mammalian cells that express a transgene encoded by said insert sequence as compared to a comparable population of engineered mammalian cells in which said contacting is not performed.

[0009] In some embodiments, said contacting said plurality of mammalian cells with said DNase results in an increase in the percentage of viable cells in said population of engineered mammalian cells as compared to a comparable population of engineered mammalian cells in which said contacting is not performed.

[0010] In some embodiments, said contacting said plurality of mammalian cells with said DNase results in an increase in the percentage of viable cells in said population of engineered mammalian cells that express a transgene encoded by said insert sequence as compared to a comparable population of engineered mammalian cells in which said contacting is not performed.

[0011] In some embodiments, at least 60% of the cells in said population of engineered mammalian cells express a transgene encoded by said insert sequence, as measured by detection of said transgene by flow cytometry 7 days after said plurality of mammalian cells is contacted with said polynucleic acid construct.

[0012] In some embodiments, said DNase is selected from the group consisting of DNase I, Benzonase, Exonuclease I, Exonuclease III, Mung Bean Nuclease, Nuclease BAL 31, RNase I, S1 Nuclease, Lambda Exonuclease, RecJ, T7 exonuclease, restriction enzymes, and any combination thereof. In some embodiments, said DNase is DNase I. In some embodiments, said DNase is present at a concentration from about 5 μg/ml to about 15 μg/ml.

[0013] In some embodiments, the method further comprises contacting said plurality of mammalian cells with an exogenous immunostimulatory agent.

[0014] In some embodiments, said contacting said plurality of mammalian cells with said exogenous immunostimulatory agent results in an increase in the percentage of cells in said population of engineered mammalian cells that express a transgene encoded by said insert sequence as compared to a comparable population of engineered mammalian cells in which said contacting is not performed.

[0015] In some embodiments, said contacting said plurality of cells with said exogenous immunostimulatory agent results in an increase in the percentage of viable cells in said population of engineered mammalian cells as compared to a comparable population of engineered mammalian cells in which said contacting is not performed.

[0016] In some embodiments, said contacting said plurality of cells with said exogenous immunostimulatory agent results in an increase in the percentage of viable cells in said population of engineered mammalian cells that express a transgene encoded by said insert sequence as compared to a comparable population of engineered mammalian cells in which said contacting is not performed.

[0017] In some embodiments, at least 60% of the cells in said population of engineered mammalian cells express a transgene encoded by said insert sequence, as measured by detection of said transgene by flow cytometry 7 days after said plurality of mammalian cells is contacted with said polynucleic acid construct.

[0018] In some embodiments, said exogenous immunostimulatory agent is B7, CD80, CD83, CD86, CD32, CD64, 4-1BBL, anti-CD3, anti-CD3 mAb, S-2-hydroxyglutarate, anti-CD28, anti-CD28 mAb, CD1d, anti-CD2, IL-15, IL-17, IL-21, IL-2, IL-7, or truncated CD19.

[0019] In some embodiments, said exogenous immunostimulatory agent is configured to stimulate expansion of at least a portion of said plurality of mammalian cells. In some embodiments, the concentration of said immunostimulatory agent is from about 50 IU/ml to about 1000 IU/ml.

[0020] In some embodiments, the method further comprises contacting said plurality of mammalian cells with an exogenous agent that modulates DNA double strand break repair. In some embodiments, said contacting said plurality of mammalian cells with said exogenous immunostimulatory agent results in an increase in the percentage of cells in said population of engineered mammalian cells that express a transgene encoded by said insert sequence as compared to a comparable population of engineered mammalian cells in which said contacting is not performed. In some embodiments, said contacting said plurality of mammalian cells with said exogenous immunostimulatory agent results in an increase in the percentage of viable cells in said population of engineered mammalian cells as compared to a comparable population of engineered mammalian cells in which said contacting is not performed. In some embodiments, said contacting said plurality of mammalian cells with said exogenous immunostimulatory agent results in an increase in the percentage of viable cells in said population of engineered mammalian cells that express a transgene encoded by said insert sequence as compared to a comparable population of engineered mammalian cells in which said contacting is not performed. In some embodiments, at least 60% of the cells in said population of engineered mammalian cells express a transgene encoded by said insert sequence, as measured by detection of said transgene by flow cytometry 7 days after said plurality of mammalian cells is contacted with said polynucleic acid construct.

[0021] In some embodiments, said agent comprises NAC or an anti-IFNAR2 antibody. In some embodiments, said agent comprises a protein involved in DNA double strand break repair. In some embodiments, said protein involved in DNA double strand break repair is selected from the group consisting of: Ku70, Ku80, BRCA1, BRCA2, RAD51, RS-1, PALB2, Nap1, p400 ATPase, EVL, NAC, MRE11, RAD50, RAD52, RAD55, RAD57, RAD54, RAD54B, Srs2, NBS1, H2AX, PARP-1, RAD18, DNA-PKcs, XRCC4, XLF, Artemis, TdT, pol μ and pol λ, ATM, AKT1, AKT2, AKT3, Nibrin, CtIP, EXO1, BLM, E4 orf6, E1b55K, and Scr7.

[0022] In some embodiments, said plurality of mammalian cells are cultured in vitro or ex vivo in a culture medium, wherein said culture medium is substantially antibiotic free.

[0023] In some embodiments, said insert sequence is introduced into said plurality of mammalian cells using a plasmid, a minicircle vector, a linearized double stranded DNA construct, or a viral vector.

[0024] In some embodiments, said insert sequence comprises a sequence encoding an exogenous receptor. In some embodiments, said exogenous receptor is a T cell receptor (TCR), a chimeric antigen receptor (CAR), a B cell receptor (BCR), a natural killer cell (NK cell) receptor, a cytokine receptor, or a chemokine receptor. In some embodiments, said exogenous receptor is an immune receptor with specificity for a disease-associated antigen. In some embodiments, said exogenous receptor is an immune receptor that specifically binds to a cancer antigen. In some embodiments, said exogenous receptor is an immune receptor that specifically binds an autoimmune antigen.

[0025] In some embodiments, said insert sequence comprises a promoter sequence, an enhancer sequence, or both a promoter sequence and an enhancer sequence.

[0026] In some embodiments, said method further comprises cleaving said target site in the genome of said plurality of mammalian cells. In some embodiments said cleaving said target site comprises cleaving with an endonuclease. In some embodiments, said cleaving said polynucleic acid construct comprises cleaving with an endonuclease. In some embodiments, said endonuclease is a CRISPR-associated endonuclease. In some embodiments, said endonuclease is a Cas9. In some embodiments, (a) further comprises introducing into said plurality of mammalian cells a first guide RNA (gRNA) or a polynucleic acid encoding said first gRNA. In some embodiments, (a) further comprises introducing into said plurality of mammalian cells a second guide RNA (gRNA) or a polynucleic acid encoding said second gRNA. In some embodiments, said first guide RNA targets said endonuclease to produce at least one double stranded break in the genome of said plurality of mammalian cells. In some embodiments, said first guide RNA targets said endonuclease to produce at least one double stranded break in the polynucleic acid construct.

[0027] In some aspects, a first gRNA and a second guide RNA comprise a sequence that comprises at least 60%, 70%, 80%, 85%, 90%, 95%, 97%, or 99% sequence identity with at least a portion of SEQ ID NO: 79 or SEQ ID NO: 82. In some cases, a first gRNA is capable of binding to an endogenous gene (such as one selected from Table 1, an immune checkpoint, and/or safe harbor gene) and a second gRNA is capable of binding a xenogeneic sequence or synthetic sequence (such as a targeting sequence of a universal gRNA provided herein).

[0028] In some embodiments, said first guide RNA targets said endonuclease to produce at least one double stranded break in the genome of said plurality of mammalian cells and at least one double stranded break in said polynucleic acid construct. In some embodiments, said double stranded break in the genome of said plurality of mammalian cells is introduced in a safe harbor locus. In some embodiments, said double stranded break in the genome of said plurality of mammalian cells is introduced in an immunomodulatory gene locus. In some embodiments, said double stranded break in the genome of said plurality of mammalian cells is introduced in an immune checkpoint gene locus. In some embodiments, said double stranded break in the genome of said plurality of mammalian cells is introduced in a gene that codes for an receptor. In some embodiments, said double stranded break in the genome of said plurality of mammalian cells is introduced in a gene that codes for a T cell receptor component. In some embodiments, said double stranded break in the genome of said plurality of mammalian cells is introduced in a TRAC or TCRB locus.

[0029] In some embodiments, expression of said endogenous protein encoded by said TRAC or TCRB locus is disrupted.

[0030] In some embodiments, said mammalian cells are human cells. In some embodiments, said mammalian cells are primary cells. In some embodiments, said mammalian cells are immune cells. In some embodiments, said immune cells are T cells, NK cells, NKT cells, B cells, tumor infiltrating lymphocytes (TIL), B cells, macrophages, dendritic cells, or neutrophils. In some embodiments, said plurality of mammalian cells comprises human T cells, NK cells, NKT cells, tumor infiltrating lymphocytes (TIL), B cells, macrophages, dendritic cells, or neutrophils. In some embodiments, said plurality of mammalian cells comprises human T cells.

[0031] In some embodiments, (c) comprises producing two double stranded breaks in said polynucleic acid construct.

[0032] In some embodiments, (b) comprises producing two double stranded breaks in the genome of said plurality of mammalian cells, wherein said insertion sequence is inserted into the genome of said plurality of mammalian cells and bridges said two double stranded breaks in the genome of said plurality of mammalian cells.

[0033] In some embodiments, at least 1, 2, 3, 4, 5, 6, 7, 8, 9, or 10 nucleotides are deleted from the mammalian cell genome.

[0034] In some embodiments, said homology arms comprises a number of nucleotides that is a multiple of three or four. In some embodiments, said homology arms comprise at most 5-100 base pairs. In some embodiments, said homology arms comprise at most 50 base pairs. In some embodiments, said homology arms flank the sequence for insertion. In some embodiments, said homology arms are flanked by a sequence targeted by a guide RNA. In some embodiments, said homology arms are different or identical. In some cases, the homology arms are different. In some cases, the homology arms are identical. In some cases, at least one of said homology arms is flanked by a sequence targeted by a guide RNA. In some cases, both homology arms are flanked by a sequence targeted by a guide RNA. In some embodiments, said homology arms flank the sequence for insertion. In some embodiments, the homology arms comprise sequences homologous to sequences in a TRAC or TCRB locus.

[0035] In some cases, homology arms can comprise a sequence homologous to 30-70, 35-65, 40-60, 45-55, 45-50, 60-80, 60-100, 50-200, 100-400, 200-600, or 500-1000 bases in length. In some cases, homology arms comprise a sequence homologous to 48 bases in length. In some cases, the sequence is an endogenous gene sequence, for example in Table 1, an immune checkpoint sequence, and/or a safe harbor sequence.

[0036] In some embodiments, the method further comprises disrupting one or more additional genes in the mammalian cell genome.

[0037] In some embodiments, the method further comprises introducing one or more additional polynucleic acid constructs comprising sequences for insertion in (a), producing double stranded breaks at additional sites in the mammalian cell genome in (b), producing double stranded breaks in the one or more additional polynucleic acid constructs in (c), and inserting the one or more additional sequences for insertion into the additional sites in the mammalian cell genome.

[0038] In one aspect, provided herein are methods of generating a population of engineered mammalian cells, comprising: (a) contacting a plurality of mammalian cells with a polynucleic acid construct comprising an insert sequence flanked by homology arms, wherein said homology arms comprise a sequence homologous to a sequence adjacent to a target site in the genome of said plurality of mammalian cells; (b) cleaving said polynucleic acid construct; and (c) inserting said insert sequence in said target site, wherein said inserting is at least 10% more efficient than a method that does not comprise (b), to thereby generate a population of engineered mammalian cells.

[0039] In some embodiments, the method further comprises expanding said population of genetically engineered mammalian cells.

[0040] In some embodiments, the method further comprises contacting said plurality of mammalian cells with a DNase.

[0041] In some embodiments, said contacting said plurality of mammalian cells with said DNase results in an increase in the percentage of cells in said population of engineered mammalian cells that express a transgene encoded by said insert sequence as compared to a comparable population of engineered mammalian cells in which said contacting is not performed.

[0042] In some embodiments, said contacting said plurality of mammalian cells with said DNase results in an increase in the percentage of viable cells in said population of engineered mammalian cells as compared to a comparable population of engineered mammalian cells in which said contacting is not performed.

[0043] In some embodiments, said contacting said plurality of mammalian cells with said DNase results in an increase in the percentage of viable cells in said population of engineered mammalian cells that express a transgene encoded by said insert sequence as compared to a comparable population of engineered mammalian cells in which said contacting is not performed.

[0044] In some embodiments, at least 60% of the cells in said population of engineered mammalian cells express a transgene encoded by said insert sequence, as measured by detection of said transgene by flow cytometry 7 days after said plurality of mammalian cells is contacted with said polynucleic acid construct.

[0045] In some embodiments, at least 60%, 65%, 70%, 75%, 80%, or 90% of the cells in said population of engineered mammalian cells express said transgene encoded by said insert sequence, as measured by detection of said transgene by flow cytometry 7 days after said plurality of mammalian cells is contacted with said polynucleic acid construct.

[0046] In some embodiments, said DNase is selected from the group consisting of: DNase I, Benzonase, Exonuclease I, Exonuclease III, Mung Bean Nuclease, Nuclease BAL 31, RNase I, S1 Nuclease, Lambda Exonuclease, RecJ, T7 exonuclease, restriction enzymes, and any combination thereof. In some embodiments, said DNase is DNase I. In some embodiments, said DNase is present at a concentration from about 5 μg/ml to about 15 μg/ml.

[0047] In some embodiments, the method further comprises contacting said plurality of mammalian cells with an exogenous immunostimulatory agent.

[0048] In some embodiments, said contacting said plurality of mammalian cells with said exogenous immunostimulatory agent results in an increase in the percentage of cells in said population of engineered mammalian cells that express a transgene encoded by said insert sequence as compared to a comparable population of engineered mammalian cells in which said contacting is not performed.

[0049] In some embodiments, said contacting said plurality of cells with said exogenous immunostimulatory agent results in an increase in the percentage of viable cells in said population of engineered mammalian cells as compared to a comparable population of engineered mammalian cells in which said contacting is not performed.

[0050] In some embodiments, said contacting said plurality of cells with said exogenous immunostimulatory agent results in an increase in the percentage of viable cells in said population of engineered mammalian cells that express a transgene encoded by said insert sequence as compared to a comparable population of engineered mammalian cells in which said contacting is not performed.

[0051] In some embodiments, at least 60% of the cells in said population of engineered mammalian cells express a transgene encoded by said insert sequence, as measured by detection of said transgene by flow cytometry 7 days after said plurality of mammalian cells is contacted with said polynucleic acid construct.

[0052] In some embodiments, said exogenous immunostimulatory agent is B7, CD80, CD83, CD86, CD32, CD64, 4-1BBL, anti-CD3, anti-CD3 mAb, S-2-hydroxyglutarate, anti-CD28, anti-CD28 mAb, CD1d, anti-CD2, IL-15, IL-17, IL-21, IL-2, IL-7, or truncated CD19.

[0053] In some embodiments, said exogenous immunostimulatory agent is configured to stimulate expansion of at least a portion of said plurality of mammalian cells. In some embodiments, the concentration of said immunostimulatory agent is from about 50 IU/ml to about 1000 IU/ml.

[0054] In some embodiments, the contacting of a plurality of mammalian cells with a polynucleic acid construct that comprises an insert sequence flanked by a homology arms occurs from 30 hrs-36 hrs after said contacting with said exogenous immunostimulatory agent. In some embodiments the contacting of a plurality of mammalian cells with a polynucleic acid construct that comprises an insert sequence flanked by homology arms occurs 36 hours after said contacting with said exogenous immunostimulatory agent.

[0055] In some embodiments, the method further comprises contacting said plurality of mammalian cells with an exogenous agent that modulates DNA double strand break repair. In some embodiments, said contacting said plurality of mammalian cells with said exogenous immunostimulatory agent results in an increase in the percentage of cells in said population of engineered mammalian cells that express a transgene encoded by said insert sequence as compared to a comparable population of engineered mammalian cells in which said contacting is not performed. In some embodiments, said contacting said plurality of mammalian cells with said exogenous immunostimulatory agent results in an increase in the percentage of viable cells in said population of engineered mammalian cells as compared to a comparable population of engineered mammalian cells in which said contacting is not performed. In some embodiments, said contacting said plurality of mammalian cells with said exogenous immunostimulatory agent results in an increase in the percentage of viable cells in said population of engineered mammalian cells that express a transgene encoded by said insert sequence as compared to a comparable population of engineered mammalian cells in which said contacting is not performed. In some embodiments, at least 60% of the cells in said population of engineered mammalian cells express a transgene encoded by said insert sequence, as measured by detection of said transgene by flow cytometry 7 days after said plurality of mammalian cells is contacted with said polynucleic acid construct.

[0056] In some embodiments, said agent comprises NAC or an anti-IFNAR2 antibody. In some embodiments, said agent comprises a protein involved in DNA double strand break repair. In some embodiments, said protein involved in DNA double strand break repair is selected from the group consisting of: Ku70, Ku80, BRCA1, BRCA2, RAD51, RS-1, PALB2, Nap1, p400 ATPase, EVL, NAC, MRE11, RAD50, RAD52, RAD55, RAD57, RAD54, RAD54B, Srs2, NBS1, H2AX, PARP-1, RAD18, DNA-PKcs, XRCC4, XLF, Artemis, TdT, pol μ and pol λ, ATM, AKT1, AKT2, AKT3, Nibrin, CtIP, EXO1, BLM, E4 orf6, E1b55K, and Scr7.

[0057] In some embodiments, said plurality of mammalian cells are cultured in vitro or ex vivo in a culture medium, wherein said culture medium is substantially antibiotic free.

[0058] In some embodiments, said insert sequence is introduced into said plurality of mammalian cells using a plasmid, a minicircle vector, a linearized double stranded DNA construct, or a viral vector.

[0059] In some embodiments, said insert sequence or transgene comprises a sequence encoding an exogenous receptor. In some embodiments, said exogenous receptor is a T cell receptor (TCR), a chimeric antigen receptor (CAR), a B cell receptor (BCR), a natural killer cell (NK cell) receptor, a cytokine receptor, or a chemokine receptor. In some embodiments, said exogenous receptor is an immune receptor with specificity for a disease-associated antigen. In some embodiments, said exogenous receptor is an immune receptor that specifically binds to a cancer antigen. In some embodiments, said exogenous receptor is an immune receptor that specifically binds an autoimmune antigen.

[0060] In some cases, an exogenous receptor can be a TCR. In other cases, an exogenous receptor can be a CAR. A CAR can be coded by a polypeptide sequence that comprises at least 60%, 70%, 80%, 90%, 95%, 98%, or 100% identity with the polypeptide of SEQ ID NO: 91. In some cases, a polynucleic acid construct comprises at least 60%, 70%, 80%, 85%, 90%, 95%, 97%, or 99% sequence identity with at least a portion of SEQ ID NO: 90. In some cases, a polynucleic acid construct comprises SEQ ID NO: 90, or modified versions thereof.

[0061] In some embodiments, said insert sequence comprises a promoter sequence, an enhancer sequence, or both a promoter sequence and an enhancer sequence.

[0062] In some embodiments, said method further comprises cleaving said target site in the genome of said plurality of mammalian cells. In some embodiments, said cleaving said target site comprises cleaving with an endonuclease. In some embodiments, said cleaving said polynucleic acid construct comprises cleaving with an endonuclease. In some embodiments, said endonuclease is a CRISPR-associated endonuclease. In some embodiments, said endonuclease is a Cas9. In some embodiments, (a) further comprises introducing into said plurality of mammalian cells a first guide RNA (gRNA) or a polynucleic acid encoding said first gRNA. In some embodiments, (a) further comprises introducing into said plurality of mammalian cells a second guide RNA (gRNA) or a polynucleic acid encoding said second gRNA. In some embodiments, said first guide RNA targets said endonuclease to produce at least one double stranded break in the genome of said plurality of mammalian cells. In some embodiments, said first guide RNA targets said endonuclease to produce at least one double stranded break in the polynucleic acid construct.

[0063] In some embodiments, said first guide RNA targets said endonuclease to produce at least one double stranded break in the genome of said plurality of mammalian cells and at least one double stranded break in said polynucleic acid construct. In some embodiments, said double stranded break in the genome of said plurality of mammalian cells is introduced in a safe harbor locus. In some embodiments, said double stranded break in the genome of said plurality of mammalian cells is introduced in an immunomodulatory gene locus. In some embodiments, said double stranded break in the genome of said plurality of mammalian cells is introduced in an immune checkpoint gene locus. In some embodiments, said double stranded break in the genome of said plurality of mammalian cells is introduced in a gene that codes for a receptor. In some embodiments, said double stranded break in the genome of said plurality of mammalian cells is introduced in a gene that codes for a T cell receptor component. In some embodiments, said double stranded break in the genome of said plurality of mammalian cells is introduced in a TRAC or TCRB locus.

[0064] In some embodiments, expression of said endogenous protein encoded by said TRAC or TCRB locus is disrupted. In some cases, a double stranded break in a genome of a plurality of mammalian cells is introduced in the TRAC locus. In some cases, the double stranded break in the genome of the plurality of mammalian cells is introduced in exon 1 of the TRAC locus. In some cases, the double stranded break in the genome of the plurality of mammalian cells is introduced in exon 1 of TRAC, and comprises at least a portion of SEQ ID NO: 80 or a sequence at least about 1000 bases on either side, 5′ or 3′, of SEQ ID NO: 80.

[0065] In some embodiments, said mammalian cells are human cells. In some embodiments, said mammalian cells are primary cells. In some embodiments, said mammalian cells are immune cells. In some embodiments, said immune cells are T cells, NK cells, NKT cells, B cells, tumor infiltrating lymphocytes (TIL), B cells, macrophages, dendritic cells, or neutrophils. In some embodiments, said plurality of mammalian cells comprises human T cells, NK cells, NKT cells, tumor infiltrating lymphocytes (TIL), B cells, macrophages, dendritic cells, or neutrophils. In some embodiments, said plurality of mammalian cells comprises human T cells.

[0066] In some embodiments, (c) comprises producing two double stranded breaks in said polynucleic acid construct.

[0067] In some embodiments, (b) comprises producing two double stranded breaks in the genome of said plurality of mammalian cells, wherein said insertion sequence is inserted into the genome of said plurality of mammalian cells and bridges said two double stranded breaks in the genome of said plurality of mammalian cells.

[0068] In some embodiments, at least 1, 2, 3, 4, 5, 6, 7, 8, 9, or 10 nucleotides are deleted from the mammalian cell genome.

[0069] In some embodiments, said homology arms comprise a number of nucleotides that are multiples of three or four. In some embodiments, said homology arms comprise at most 5-100 base pairs. In some embodiments, said homology arms comprise at most 50 base pairs. In some embodiments, said homology arms comprise at most 75 base pairs. In some embodiments, said homology arms flank the sequence for insertion. In some embodiments, said homology arms are flanked by a sequence targeted by a guide RNA. In some embodiments, said polynucleic acid construct comprises identical or different homology arms. In some embodiments, said homology arms flank the sequence for insertion. In some embodiments, the homology arms comprise sequences homologous to sequences in a TRAC or TCRB locus.

[0070] In some embodiments, the method further comprises disrupting one or more additional genes in the mammalian cell genome.

[0071] In some embodiments, the method further comprises introducing one or more additional polynucleic acid constructs comprising sequences for insertion in (a), producing double stranded breaks at additional sites in the mammalian cell genome in (b), producing double stranded breaks in the one or more additional polynucleic acid constructs in (c), and inserting the one or more additional sequences for insertion into the additional sites in the mammalian cell genome.

[0072] In one aspect, provided herein are methods of generating a population of engineered mammalian cells, comprising: (a) contacting a plurality of mammalian cells with a polynucleic acid construct that comprises an insert sequence of at least 1000 base pairs flanked by homology arms, wherein said homology arms comprise a sequence homologous to at most 400 consecutive nucleotides of a sequence adjacent to a target site in the genome of said plurality of mammalian cells; (b) cleaving said polynucleic acid construct; and (c) inserting said insert sequence in said target site, wherein said inserting is at least 10% more efficient than a method wherein the homology arms comprise a sequence homologous to at least 500 consecutive nucleotides of said sequence adjacent to said target site, to thereby generate a population of engineered mammalian cells.

[0073] In some embodiments, the method further comprises expanding said population of genetically engineered mammalian cells.

[0074] In some embodiments, the method further comprises contacting said plurality of mammalian cells with a DNase.

[0075] In some embodiments, said contacting said plurality of mammalian cells with said DNase results in an increase in the percentage of cells in said population of engineered mammalian cells that express a transgene encoded by said insert sequence as compared to a comparable population of engineered mammalian cells in which said contacting is not performed.

[0076] In some embodiments, said contacting said plurality of mammalian cells with said DNase results in an increase in the percentage of viable cells in said population of engineered mammalian cells as compared to a comparable population of engineered mammalian cells in which said contacting is not performed.

[0077] In some embodiments, said contacting said plurality of mammalian cells with said DNase results in an increase in the percentage of viable cells in said population of engineered mammalian cells that express a transgene encoded by said insert sequence as compared to a comparable population of engineered mammalian cells in which said contacting is not performed.

[0078] In some embodiments, at least 60% of the cells in said population of engineered mammalian cells express a transgene encoded by said insert sequence, as measured by detection of said transgene by flow cytometry 7 days after said plurality of mammalian cells is contacted with said polynucleic acid construct.

[0079] In some embodiments, said DNase is selected from the group consisting of DNase I, Benzonase, Exonuclease I, Exonuclease III, Mung Bean Nuclease, Nuclease BAL 31, RNase I, S1 Nuclease, Lambda Exonuclease, RecJ, T7 exonuclease, restriction enzymes, and any combination thereof. In some embodiments, said DNase is DNase I. In some embodiments, said DNase is present at a concentration from about 5 μg/ml to about 15 μg/ml.

[0080] In some embodiments, the method further comprises contacting said plurality of mammalian cells with an exogenous immunostimulatory agent.

[0081] In some embodiments, said contacting said plurality of mammalian cells with said exogenous immunostimulatory agent results in an increase in the percentage of cells in said population of engineered mammalian cells that express a transgene encoded by said insert sequence as compared to a comparable population of engineered mammalian cells in which said contacting is not performed.

[0082] In some embodiments, said contacting said plurality of cells with said exogenous immunostimulatory agent results in an increase in the percentage of viable cells in said population of engineered mammalian cells as compared to a comparable population of engineered mammalian cells in which said contacting is not performed.

[0083] In some embodiments, said contacting said plurality of cells with said exogenous immunostimulatory agent results in an increase in the percentage of viable cells in said population of engineered mammalian cells that express a transgene encoded by said insert sequence as compared to a comparable population of engineered mammalian cells in which said contacting is not performed.

[0084] In some embodiments, at least 60% of the cells in said population of engineered mammalian cells express a transgene encoded by said insert sequence, as measured by detection of said transgene by flow cytometry 7 days after said plurality of mammalian cells is contacted with said polynucleic acid construct.

[0085] In some embodiments, said exogenous immunostimulatory agent is B7, CD80, CD83, CD86, CD32, CD64, 4-1BBL, anti-CD3, anti-CD3 mAb, S-2-hydroxyglutarate, anti-CD28, anti-CD28 mAb, CD1d, anti-CD2, IL-15, IL-17, IL-21, IL-2, IL-7, or truncated CD19.

[0086] In some embodiments, said exogenous immunostimulatory agent is configured to stimulate expansion of at least a portion of said plurality of mammalian cells. In some embodiments, the concentration of said immunostimulatory agent is from about 50 IU/ml to about 1000 IU/ml.

[0087] In some embodiments, the method further comprises contacting said plurality of mammalian cells with an exogenous agent that modulates DNA double strand break repair. In some embodiments, said contacting said plurality of mammalian cells with said exogenous immunostimulatory agent results in an increase in the percentage of cells in said population of engineered mammalian cells that express a transgene encoded by said insert sequence as compared to a comparable population of engineered mammalian cells in which said contacting is not performed. In some embodiments, said contacting said plurality of mammalian cells with said exogenous immunostimulatory agent results in an increase in the percentage of viable cells in said population of engineered mammalian cells as compared to a comparable population of engineered mammalian cells in which said contacting is not performed. In some embodiments, said contacting said plurality of mammalian cells with said exogenous immunostimulatory agent results in an increase in the percentage of viable cells in said population of engineered mammalian cells that express a transgene encoded by said insert sequence as compared to a comparable population of engineered mammalian cells in which said contacting is not performed. In some embodiments, at least 60% of the cells in said population of engineered mammalian cells express a transgene encoded by said insert sequence, as measured by detection of said transgene by flow cytometry 7 days after said plurality of mammalian cells is contacted with said polynucleic acid construct.

[0088] In some embodiments, said agent comprises NAC or an anti-IFNAR2 antibody. In some embodiments, said agent comprises a protein involved in DNA double strand break repair. In some embodiments, said protein involved in DNA double strand break repair is selected from the group consisting of: Ku70, Ku80, BRCA1, BRCA2, RAD51, RS-1, PALB2, Nap1, p400 ATPase, EVL, NAC, MRE11, RAD50, RAD52, RAD55, RAD57, RAD54, RAD54B, Srs2, NBS1, H2AX, PARP-1, RAD18, DNA-PKcs, XRCC4, XLF, Artemis, TdT, pol μ and pol λ, ATM, AKT1, AKT2, AKT3, Nibrin, CtIP, EXO1, BLM, E4 orf6, E1b55K, and Scr7.

[0089] In some embodiments, said plurality of mammalian cells are cultured in vitro or ex vivo in a culture medium, wherein said culture medium is substantially antibiotic free.

[0090] In some embodiments, said insert sequence is introduced into said plurality of mammalian cells using a plasmid, a minicircle vector, a linearized double stranded DNA construct, or a viral vector.

[0091] In some embodiments, said insert sequence comprises a sequence encoding an exogenous receptor. In some embodiments, said exogenous receptor is a T cell receptor (TCR), a chimeric antigen receptor (CAR), a B cell receptor (BCR), a natural killer cell (NK cell) receptor, a cytokine receptor, or a chemokine receptor. In some embodiments, said exogenous receptor is an immune receptor with specificity for a disease-associated antigen. In some embodiments, said exogenous receptor is an immune receptor that specifically binds to a cancer antigen. In some embodiments, said exogenous receptor is an immune receptor that specifically binds an autoimmune antigen.

[0092] In some embodiments, said insert sequence comprises a promoter sequence, an enhancer sequence, or both a promoter sequence and an enhancer sequence.

[0093] In some embodiments, said method further comprises cleaving said target site in the genome of said plurality of mammalian cells. In some embodiments, said cleaving said target site comprises cleaving with an endonuclease. In some embodiments, said cleaving said polynucleic acid construct comprises cleaving with an endonuclease. In some embodiments, said endonuclease is a CRISPR-associated endonuclease. In some embodiments, said endonuclease is a Cas9. In some embodiments, (a) further comprises introducing into said plurality of mammalian cells a first guide RNA (gRNA) or a polynucleic acid encoding said first gRNA. In some embodiments, (a) further comprises introducing into said plurality of mammalian cells a second guide RNA (gRNA) or a polynucleic acid encoding said second gRNA. In some embodiments, said first guide RNA targets said endonuclease to produce at least one double stranded break in the genome of said plurality of mammalian cells. In some embodiments, said first guide RNA targets said endonuclease to produce at least one double stranded break in the polynucleic acid construct.

[0094] In some embodiments, said first guide RNA targets said endonuclease to produce at least one double stranded break in the genome of said plurality of mammalian cells and at least one double stranded break in said polynucleic acid construct. In some embodiments, said double stranded break in the genome of said plurality of mammalian cells is introduced in a safe harbor locus. In some embodiments, said double stranded break in the genome of said plurality of mammalian cells is introduced in an immunomodulatory gene locus. In some embodiments, said double stranded break in the genome of said plurality of mammalian cells is introduced in an immune checkpoint gene locus. In some embodiments, said double stranded break in the genome of said plurality of mammalian cells is introduced in a gene that codes for a receptor. In some embodiments, said double stranded break in the genome of said plurality of mammalian cells is introduced in a gene that codes for a T cell receptor component. In some embodiments, said double stranded break in the genome of said plurality of mammalian cells is introduced in a TRAC or TCRB locus.

[0095] In some embodiments, expression of said endogenous protein encoded by said TRAC or TCRB locus is disrupted.

[0096] In some embodiments, said mammalian cells are human cells. In some embodiments, said mammalian cells are primary cells. In some embodiments, said mammalian cells are immune cells. In some embodiments, said immune cells are T cells, NK cells, NKT cells, B cells, tumor infiltrating lymphocytes (TIL), B cells, macrophages, dendritic cells, or neutrophils. In some embodiments, said plurality of mammalian cells comprises human T cells, NK cells, NKT cells, tumor infiltrating lymphocytes (TIL), B cells, macrophages, dendritic cells, or neutrophils. In some embodiments, said plurality of mammalian cells comprises human T cells.

[0097] In some embodiments, (c) comprises producing two double stranded breaks in said polynucleic acid construct.

[0098] In some embodiments, (b) comprises producing two double stranded breaks in the genome of said plurality of mammalian cells, wherein said insertion sequence is inserted into the genome of said plurality of mammalian cells and bridges said two double stranded breaks in the genome of said plurality of mammalian cells.

[0099] In some embodiments, at least 1, 2, 3, 4, 5, 6, 7, 8, 9, or 10 nucleotides are deleted from the mammalian cell genome.

[0100] In some embodiments, said homology arms comprises a number of nucleotides that is a multiple of three or four. In some embodiments, said homology arms comprise at most 5-100 base pairs. In some embodiments, said homology arms comprise at most 50 base pairs. In some embodiments, said homology arms comprise at most 75 base pairs. In some embodiments, said homology arms flank the sequence for insertion. In some embodiments, said homology arms are flanked by a sequence targeted by a guide RNA. In some embodiments, said polynucleic acid construct comprises identical or different homology arms. In some embodiments, said homology arms flank the sequence for insertion. In some embodiments, the homology arms comprise sequences homologous to sequences in a TRAC or TCRB locus.

[0101] In some embodiments, the method further comprises disrupting one or more additional genes in the mammalian cell genome.

[0102] In some embodiments, the method further comprises introducing one or more additional polynucleic acid constructs comprising sequences for insertion in (a), producing double stranded breaks at additional sites in the mammalian cell genome in (b), producing double stranded breaks in the one or more additional polynucleic acid constructs in (c), and inserting the one or more additional sequences for insertion into the additional sites in the mammalian cell genome.

[0103] In one aspect, provided herein are methods of generating a population of engineered mammalian cells, comprising: (a) contacting a plurality of mammalian cells with a polynucleic acid construct comprising an insert sequence flanked by homology arms, wherein said homology arms comprise a sequence homologous to at most 400 consecutive nucleotides of a sequence adjacent to a target site in the genome of said plurality of mammalian cells; (b) cleaving said polynucleic acid construct; (c) generating a first double stranded break in the genome of said plurality of mammalian cells at said target site and generating a second double stranded break in the genome of said plurality of mammalian cells at a second site; and (d) inserting said insert sequence in said target site, to thereby generate a population of engineered mammalian cells.

[0104] In some embodiments, the method further comprises expanding said population of genetically engineered mammalian cells.

[0105] In some embodiments, the method further comprises contacting said plurality of mammalian cells with a DNase.

[0106] In some embodiments, said contacting said plurality of mammalian cells with said DNase results in an increase in the percentage of cells in said population of engineered mammalian cells that express a transgene encoded by said insert sequence as compared to a comparable population of engineered mammalian cells in which said contacting is not performed.

[0107] In some embodiments, said contacting said plurality of mammalian cells with said DNase results in an increase in the percentage of viable cells in said population of engineered mammalian cells as compared to a comparable population of engineered mammalian cells in which said contacting is not performed.

[0108] In some embodiments, said contacting said plurality of mammalian cells with said DNase results in an increase in the percentage of viable cells in said population of engineered mammalian cells that express a transgene encoded by said insert sequence as compared to a comparable population of engineered mammalian cells in which said contacting is not performed.

[0109] In some embodiments, at least 60% of the cells in said population of engineered mammalian cells express a transgene encoded by said insert sequence, as measured by detection of said transgene by flow cytometry 7 days after said plurality of mammalian cells is contacted with said polynucleic acid construct.

[0110] In some embodiments, said DNase is selected from the group consisting of DNase I, Benzonase, Exonuclease I, Exonuclease III, Mung Bean Nuclease, Nuclease BAL 31, RNase I, S1 Nuclease, Lambda Exonuclease, RecJ, T7 exonuclease, restriction enzymes, and any combination thereof. In some embodiments, said DNase is DNase I. In some embodiments, said DNase is present at a concentration from about 5 μg/ml to about 15 μg/ml.

[0111] In some embodiments, the method further comprises contacting said plurality of mammalian cells with an exogenous immunostimulatory agent.

[0112] In some embodiments, said contacting said plurality of mammalian cells with said exogenous immunostimulatory agent results in an increase in the percentage of cells in said population of engineered mammalian cells that express a transgene encoded by said insert sequence as compared to a comparable population of engineered mammalian cells in which said contacting is not performed.

[0113] In some embodiments, said contacting said plurality of cells with said exogenous immunostimulatory agent results in an increase in the percentage of viable cells in said population of engineered mammalian cells as compared to a comparable population of engineered mammalian cells in which said contacting is not performed.

[0114] In some embodiments, said contacting said plurality of cells with said exogenous immunostimulatory agent results in an increase in the percentage of viable cells in said population of engineered mammalian cells that express a transgene encoded by said insert sequence as compared to a comparable population of engineered mammalian cells in which said contacting is not performed.

[0115] In some embodiments, at least 60% of the cells in said population of engineered mammalian cells express a transgene encoded by said insert sequence, as measured by detection of said transgene by flow cytometry 7 days after said plurality of mammalian cells is contacted with said polynucleic acid construct.

[0116] In some embodiments, said exogenous immunostimulatory agent is B7, CD80, CD83, CD86, CD32, CD64, 4-1BBL, anti-CD3, anti-CD3 mAb, S-2-hydroxyglutarate, anti-CD28, anti-CD28 mAb, CD1d, anti-CD2, IL-15, IL-17, IL-21, IL-2, IL-7, or truncated CD19.

[0117] In some embodiments, said exogenous immunostimulatory agent is configured to stimulate expansion of at least a portion of said plurality of mammalian cells. In some embodiments, the concentration of said immunostimulatory agent is from about 50 IU/ml to about 1000 IU/ml.

[0118] In some embodiments, the method further comprises contacting said plurality of mammalian cells with an exogenous agent that modulates DNA double strand break repair. In some embodiments, said contacting said plurality of mammalian cells with said exogenous immunostimulatory agent results in an increase in the percentage of cells in said population of engineered mammalian cells that express a transgene encoded by said insert sequence as compared to a comparable population of engineered mammalian cells in which said contacting is not performed. In some embodiments, said contacting said plurality of mammalian cells with said exogenous immunostimulatory agent results in an increase in the percentage of viable cells in said population of engineered mammalian cells as compared to a comparable population of engineered mammalian cells in which said contacting is not performed. In some embodiments, said contacting said plurality of mammalian cells with said exogenous immunostimulatory agent results in an increase in the percentage of viable cells in said population of engineered mammalian cells that express a transgene encoded by said insert sequence as compared to a comparable population of engineered mammalian cells in which said contacting is not performed. In some embodiments, at least 60% of the cells in said population of engineered mammalian cells express a transgene encoded by said insert sequence, as measured by detection of said transgene by flow cytometry 7 days after said plurality of mammalian cells is contacted with said polynucleic acid construct.

[0119] In some embodiments, said agent comprises NAC or an anti-IFNAR2 antibody. In some embodiments, said agent comprises a protein involved in DNA double strand break repair. In some embodiments, said protein involved in DNA double strand break repair is selected from the group consisting of: Ku70, Ku80, BRCA1, BRCA2, RAD51, RS-1, PALB2, Nap1, p400 ATPase, EVL, NAC, MRE11, RAD50, RAD52, RAD55, RAD57, RAD54, RAD54B, Srs2, NBS1, H2AX, PARP-1, RAD18, DNA-PKcs, XRCC4, XLF, Artemis, TdT, pol μ and pol λ, ATM, AKT1, AKT2, AKT3, Nibrin, CtIP, EXO1, BLM, E4 orf6, E1b55K, and Scr7.

[0120] In some embodiments, said plurality of mammalian cells are cultured in vitro or ex vivo in a culture medium, wherein said culture medium is substantially antibiotic free.

[0121] In some embodiments, said insert sequence is introduced into said plurality of mammalian cells using a plasmid, a minicircle vector, a linearized double stranded DNA construct, or a viral vector.

[0122] In some embodiments, said insert sequence comprises a sequence encoding an exogenous receptor. In some embodiments, said exogenous receptor is a T cell receptor (TCR), a chimeric antigen receptor (CAR), a B cell receptor (BCR), a natural killer cell (NK cell) receptor, a cytokine receptor, or a chemokine receptor. In some embodiments, said exogenous receptor is an immune receptor with specificity for a disease-associated antigen. In some embodiments, said exogenous receptor is an immune receptor that specifically binds to a cancer antigen. In some embodiments, said exogenous receptor is an immune receptor that specifically binds an autoimmune antigen.

[0123] In some embodiments, said insert sequence comprises a promoter sequence, an enhancer sequence, or both a promoter sequence and an enhancer sequence.

[0124] In some embodiments, said method further comprises cleaving said target site in the genome of said plurality of mammalian cells. In some embodiments, said cleaving said target site comprises cleaving with an endonuclease. In some embodiments, said cleaving said polynucleic acid construct comprises cleaving with an endonuclease. In some embodiments, said endonuclease is a CRISPR-associated endonuclease. In some embodiments, said endonuclease is a Cas9. In some embodiments, (a) further comprises introducing into said plurality of mammalian cells a first guide RNA (gRNA) or a polynucleic acid encoding said first gRNA. In some embodiments, (a) further comprises introducing into said plurality of mammalian cells a second guide RNA (gRNA) or a polynucleic acid encoding said second gRNA. In some embodiments, said first guide RNA targets said endonuclease to produce at least one double stranded break in the genome of said plurality of mammalian cells. In some embodiments, said first guide RNA targets said endonuclease to produce at least one double stranded break in the polynucleic acid construct.

[0125] In some embodiments, said first guide RNA targets said endonuclease to produce at least one double stranded break in the genome of said plurality of mammalian cells and at least one double stranded break in said polynucleic acid construct. In some embodiments, said double stranded break in the genome of said plurality of mammalian cells is introduced in a safe harbor locus. In some embodiments, said double stranded break in the genome of said plurality of mammalian cells is introduced in an immunomodulatory gene locus. In some embodiments, said double stranded break in the genome of said plurality of mammalian cells is introduced in an immune checkpoint gene locus. In some embodiments, said double stranded break in the genome of said plurality of mammalian cells is introduced in a gene that codes for a receptor. In some embodiments, said double stranded break in the genome of said plurality of mammalian cells is introduced in a gene that codes for a T cell receptor component. In some embodiments, said double stranded break in the genome of said plurality of mammalian cells is introduced in a TRAC or TCRB locus.

[0126] In some embodiments, expression of said endogenous protein encoded by said TRAC or TCRB locus is disrupted.

[0127] In some embodiments, said mammalian cells are human cells. In some embodiments, said mammalian cells are primary cells. In some embodiments, said mammalian cells are immune cells. In some embodiments, said immune cells are T cells, NK cells, NKT cells, B cells, tumor infiltrating lymphocytes (TIL), B cells, macrophages, dendritic cells, or neutrophils. In some embodiments, said plurality of mammalian cells comprises human T cells, NK cells, NKT cells, tumor infiltrating lymphocytes (TIL), B cells, macrophages, dendritic cells, or neutrophils. In some embodiments, said plurality of mammalian cells comprises human T cells.

[0128] In some embodiments, (c) comprises producing two double stranded breaks in said polynucleic acid construct.

[0129] In some embodiments, (b) comprises producing two double stranded breaks in the genome of said plurality of mammalian cells, wherein said insertion sequence is inserted into the genome of said plurality of mammalian cells and bridges said two double stranded breaks in the genome of said plurality of mammalian cells.

[0130] In some embodiments, at least 1, 2, 3, 4, 5, 6, 7, 8, 9, or 10 nucleotides are deleted from the mammalian cell genome.

[0131] In some embodiments, said homology arms comprise a number of nucleotides that is a multiple of three or four. In some embodiments, said homology arms comprise at most 5-100 base pairs. In some embodiments, said homology arms comprise at most 50 base pairs. In some embodiments, said homology arms comprise at most 75 base pairs. In some embodiments, said homology arms flank the sequence for insertion. In some embodiments, said homology arms are flanked by a sequence targeted by a guide RNA. In some embodiments, said polynucleic acid construct comprises identical or different homology arms. In some embodiments, said homology arms flank the sequence for insertion. In some embodiments, the homology arms comprise sequences homologous to sequences in a TRAC or TCRB locus.

[0132] In some embodiments, the method further comprises disrupting one or more additional genes in the mammalian cell genome.

[0133] In some embodiments, the method further comprises introducing one or more additional polynucleic acid constructs comprising sequences for insertion in (a), producing double stranded breaks at additional sites in the mammalian cell genome in (b), producing double stranded breaks in the one or more additional polynucleic acid constructs in (c), and inserting the one or more additional sequences for insertion into the additional sites in the mammalian cell genome.

[0134] In one aspect, provided herein are methods of making an engineered T cell comprising: (a) providing a primary T cell from a human subject; (b) introducing, ex vivo, into the primary T cell: (i) a nuclease or a polynucleic acid encoding the nuclease, wherein the nuclease is a CRISPR-associated nuclease; (ii) a first guide RNA or polynucleic acid encoding the first guide RNA, wherein the first guide RNA targets a sequence in a TRAC or TCRB locus of the primary T cell; (iii) a second guide RNA or a polynucleic acid encoding the second guide RNA; and (iv) a polynucleic acid construct comprising a sequence for insertion, wherein the sequence for insertion comprises a sequence encoding an exogenous T cell receptor or chimeric antigen receptor, wherein the polynucleic acid construct comprises a first short homology arm and a second short homology arm that flank the sequence for insertion, wherein the first short homology arm and the second short homology arm comprise sequences homologous to sequences in the TRAC or TCRB locus of the primary T cell, wherein the first short homology arm is less than 50 base pairs and the second short homology arm is less than 50 base pairs, wherein the first short homology arm and the second short homology arm are flanked by sequences targeted by the second guide RNA; (c) producing a double stranded break in the TRAC or TCRB locus of the genome of the primary T cell, wherein double stranded break in the TRAC or TCRB locus is produced by the CRISPR-associated nuclease and the first guide RNA, wherein the double stranded break is between a first sequence homologous to the first short homology arm and a second sequence homologous to the second short homology arm; and (d) producing two double stranded breaks in the polynucleic acid construct, thereby generating a cleaved polynucleic acid construct, wherein the cleaved polynucleic acid construct comprises the first short homology arm at a first end and the second short homology arm at a second end, wherein the two double stranded breaks are produced by the CRISPR-associated nuclease and the second guide RNA; (e) inserting the sequence encoding the exogenous T cell receptor into the primary T cell genome at the site of the double stranded break in the TRAC or TCRB locus by homology mediated end joining.

[0135] In some cases, the introducing of (b) occurs from 30 hrs. to 36 hrs. after a contacting with an exogenous immunostimulatory agent. In other cases, the introducing of (b) occurs 36 hrs. after the contacting with the exogenous immunostimulatory agent. In some cases, an exogenous immunostimulatory agent is B7, CD80, CD83, CD86, CD32, CD64, 4-1BBL, anti-CD3, anti-CD3 mAb, S-2-hydroxyglutarate, anti-CD28, anti-CD28 mAb, CD1d, anti-CD2, IL-15, IL-17, IL-21, IL-2, IL-7, or truncated CD19.

[0136] In one aspect, provided herein are methods of treating cancer in a subject in need thereof, comprising administering to said subject a composition described herein. In some embodiments, said cancer is bladder cancer, epithelial cancer, bone cancer, brain cancer, breast cancer, esophageal cancer, gastrointestinal cancer, leukemia, liver cancer, lung cancer, lymphoma, myeloma, ovarian cancer, prostate cancer, sarcoma, stomach cancer, thyroid cancer, acute lymphocytic cancer, acute myeloid leukemia, alveolar rhabdomyosarcoma, anal canal, rectal cancer, ocular cancer, cancer of the neck, gallbladder cancer, pleural cancer, oral cancer, cancer of the vulva, colon cancer, cervical cancer, fibrosarcoma, gastrointestinal carcinoid tumor, Hodgkin lymphoma, kidney cancer, mesothelioma, mastocytoma, melanoma, multiple myeloma, nasopharynx cancer, non-Hodgkin lymphoma, pancreatic cancer, peritoneal cancer, renal cancer, skin cancer, small intestine cancer, soft tissue cancer, solid tumors, stomach cancer, testicular cancer, or thyroid cancer. In some embodiments, said cancer is gastrointestinal cancer, breast cancer, lymphoma, or prostate cancer. In some embodiments, said population of engineered mammalian cells are allogenic or autologous to said subject.

[0137] In one aspect, provided herein are mammalian cells, comprising: (a) a polynucleic acid construct comprising an exogenous sequence flanked by homology arms, wherein each of the homology arms comprise a sequence homologous to at most 400 consecutive nucleotides of a sequence adjacent to a target site in the genome of the mammalian cell, wherein the polynucleic acid has been cleaved and comprises a resected end; and (b) a double stranded break in the genome of the mammalian cell, wherein at least one end exposed by the double stranded break is resected.

[0138] In some embodiments, said mammalian cell are human cells. In some embodiments, said mammalian cell are primary cells. In some embodiments, said mammalian cell are immune cells. In some embodiments, said immune cells are T cells, NK cell, NKT cells, B cells, tumor infiltrating lymphocytes (TIL), macrophages, dendritic cells, or neutrophils. In some embodiments, said immune cell is a T cell.

[0139] In one aspect, provided herein are mammalian cells, comprising: (a) a polynucleic acid construct that comprises an insert sequence of at least 1000 base pairs flanked by homology arms, wherein each of the homology arms comprise a sequence homologous to at most 400 consecutive nucleotides of a sequence adjacent to a target site in the genome of said plurality of mammalian cells; and (b) a double stranded break in the genome of the mammalian cell, wherein at least one end exposed by the double stranded break is resected. In some cases, homology arms comprise a sequence homologous to 30-70, 35-65, 40-60, 45-55, or 45-50 bases in length In some cases, homology arms comprise a sequence homologous to 48 bases in length.

[0140] In some embodiments, said mammalian cell are human cells. In some embodiments, said mammalian cell are primary cells. In some embodiments, said mammalian cell are immune cells. In some embodiments, said immune cells are T cells, NK cell, NKT cells, B cells, tumor infiltrating lymphocytes (TIL), macrophages, dendritic cells, or neutrophils. In some embodiments, said immune cell is a T cell.

[0141] In one aspect, provided herein are mammalian cells made by the method described herein.

[0142] In one aspect, provided herein is a population of mammalian cells made by the method described herein.

[0143] In one aspect, provided herein are pharmaceutical compositions comprising a mammalian cell made by a method described herein.

[0144] In one aspect, provided herein are pharmaceutical compositions comprising a population of mammalian cells made by a method described herein.

[0145] In one aspect, provided herein are compositions comprising: a cell population that has been contacted with a polynucleic acid encoding a transgene; and a DNase in a concentration from about 5 μg/ml to about 15 μg/ml; wherein in the presence of said DNase at least 60% of said cell population expresses said transgene as measured by detection of said transgene by flow cytometry 7 days after said cell population is contacted with said polynucleic acid.

[0146] In some embodiments, the nuclei of at least a portion of said cell population comprise at least one exogenously added modulator of DNA double strand break repair. In some embodiments, the composition is substantially antibiotic-free media.

[0147] In some embodiments, said cell population comprises primary cells. In some embodiments, said cell population comprises primary immune cells. In some embodiments, said composition further comprises at least one exogenously-added immune stimulatory agent. In some embodiments, said at least one exogenously-added immune stimulatory agent is present at a concentration from about 50 IU/ml to about 1000 IU/ml.

[0148] In some embodiments, said DNase is present at a concentration from about 5 μg/ml to about 15 μg/ml. In some embodiments, said DNase is selected from the group consisting of: DNase I, Benzonase, Exonuclease I, Exonuclease III, Mung Bean Nuclease, Nuclease BAL 31, RNase I, S1 Nuclease, Lambda Exonuclease, RecJ, T7 exonuclease, restriction enzymes, and any combination thereof. In some embodiments, said DNase comprises DNase I.

[0149] In some embodiments, said at least one exogenously added modulator of DNA double strand break repair comprises NAC, anti-IFNAR2 antibody, or both. In some embodiments, said at least one exogenously added modulator of DNA double strand break repair comprises a protein involved in DNA double strand break repair. In some embodiments, the protein involved in DNA double strand break repair comprises a protein selected from the group consisting of: Ku70, Ku80, BRCA1, BRCA2, RAD51, RS-1, PALB2, Nap1, p400 ATPase, EVL, NAC, MRE11, RAD50, RAD52, RAD55, RAD57, RAD54, RAD54B, Srs2, NBS1, H2AX, PARP-1, RAD18, DNA-PKcs, XRCC4, XLF, Artemis, TdT, pol μ and pol λ, ATM, AKT1, AKT2, AKT3, Nibrin, CtIP, EXO1, BLM, E4 orf6, E1b55K, homologs and derivatives thereof, Scr7, and any combination thereof. In some embodiments, said at least one exogenously added protein involved in DNA double strand break repair comprises RS-1, RAD51, or both.

[0150] In some embodiments, said at least one exogenously-added immune stimulatory agent comprises B7, CD80, CD83, CD86, CD32, CD64, 4-1BBL, anti-CD3, anti-CD3 mAb, S-2-hydroxyglutarate, anti-CD28, anti-CD28 mAb, CD1d, anti-CD2, IL-15, IL-17, IL-21, IL-2, IL-7, truncated CD19, derivative thereof, or any combination. In some embodiments, said at least one exogenously-added immune stimulatory agent comprises IL-2, IL-7, IL-15, or any combination thereof. In some embodiments, said at least one exogenously-added immune stimulatory agent is configured to stimulate expansion of at least a portion of said cell population or said cells.

[0151] In some embodiments, said primary immune cells comprises a cell selected from the group consisting of: a B cell, a basophil, a dendritic cell, an eosinophil, a gamma delta T cell, a granulocyte, a helper T cell, a Langerhans cell, a lymphoid cell, an innate lymphoid cell (ILC), a macrophage, a mast cell, a megakaryocyte, a memory T cell, a monocyte, a myeloid cell, a natural killer T cell, a neutrophil, a precursor cell, a plasma cell, a progenitor cell, a regulatory T-cell, a T cell, a thymocyte, any differentiated or de-differentiated cell thereof, or any mixture or combination of cells thereof. In some embodiments, said primary immune cells comprise primary T cells.

[0152] In some embodiments, said primary T cells are isolated from a blood sample of a subject. In some embodiments, said subject is a human. In some embodiments, said blood sample is a whole blood sample or a fractioned blood sample. In some embodiments, said blood sample comprises isolated peripheral blood mononuclear cells.

[0153] In some embodiments, said primary T cells comprise a gamma delta T cell, a helper T cell, a memory T cell, a natural killer T cell, an effector T cell, or any combination thereof.

[0154] In some embodiments, said primary immune cells comprise CD3+ cells. In some embodiments, said primary immune cells comprise tumor infiltrating lymphocytes (TILs). In some embodiments, the TILs comprise T cells, B cells, natural killer cells, macrophages, differentiated or de-differentiated cell thereof, or any combination thereof.

[0155] In some embodiments, the composition further comprises antigen-presenting cells (APCs). In some embodiments, said APCs are configured to stimulate expansion of said TILs. In some embodiments, said APCs express B7, CD80, CD83, CD86, CD32, CD64, 4-1BBL, anti-CD3, anti-CD3 mAb, S-2-hydroxyglutarate, anti-CD28, anti-CD28 mAb, CD1d, anti-CD2, membrane-bound IL-15, membrane-bound IL-17, membrane-bound IL-21, membrane-bound IL-2, truncated CD19, derivative thereof, or any combination thereof.

[0156] In some embodiments, said genetically modified cells comprise disruption of one or more genomic sites. In some embodiments, said genetically modified cells comprise a modification or deletion of one or more endogenous gene. In some embodiments, said endogenous gene comprises an immune checkpoint gene. In some embodiments, said endogenous gene comprises CISH, PD-1, or both.

[0157] In some embodiments, nuclei of said genetically modified cells comprise a transgene.

[0158] In some embodiments, said transgene codes for a protein selected from the group consisting of: a cellular receptor, an immunological checkpoint protein, a cytokine, and any combination thereof. In some embodiments, said transgene codes for a cellular receptor selected from the group consisting of: a T cell receptor (TCR), a B cell receptor (BCR), a chimeric antigen receptor (CAR), or any combination thereof. In some embodiments, said transgene codes for a T cell receptor.

[0159] In one aspect, provided herein are compositions comprising a genetically modified cell population, wherein said cell population comprises a cell, a nucleus of which comprises: a polynucleic acid encoding a transgene; and at least one exogenously-added modulator of DNA double strand break repair.

[0160] In some embodiments, the composition further comprises a DNase. In some embodiments, the composition is substantially antibiotic-free media.

[0161] In some embodiments, the nuclei of at least a portion of said cell population comprise at least one exogenously added modulator of DNA double strand break repair.

[0162] In some embodiments, said cell population comprises primary cells. In some embodiments, said cell population comprises primary immune cells. In some embodiments, said composition further comprises at least one exogenously-added immune stimulatory agent. In some embodiments, said at least one exogenously-added immune stimulatory agent is present at a concentration from about 50 IU/ml to about 1000 IU/ml.

[0163] In some embodiments, said DNase is present at a concentration from about 5 μg/ml to about 15 μg/ml. In some embodiments, said DNase is selected from the group consisting of: DNase I, Benzonase, Exonuclease I, Exonuclease III, Mung Bean Nuclease, Nuclease BAL 31, RNase I, S1 Nuclease, Lambda Exonuclease, RecJ, T7 exonuclease, restriction enzymes, and any combination thereof. In some embodiments, said DNase comprises DNase I.

[0164] In some embodiments, said at least one exogenously added modulator of DNA double strand break repair comprises NAC, anti-IFNAR2 antibody, or both. In some embodiments, said at least one exogenously added modulator of DNA double strand break repair comprises a protein involved in DNA double strand break repair. In some embodiments, the protein involved in DNA double strand break repair comprises a protein selected from the group consisting of: Ku70, Ku80, BRCA1, BRCA2, RAD51, RS-1, PALB2, Nap1, p400 ATPase, EVL, NAC, MRE11, RAD50, RAD52, RAD55, RAD57, RAD54, RAD54B, Srs2, NBS1, H2AX, PARP-1, RAD18, DNA-PKcs, XRCC4, XLF, Artemis, TdT, pol μ and pol λ, ATM, AKT1, AKT2, AKT3, Nibrin, CtIP, EXO1, BLM, E4 orf6, E1b55K, homologs and derivatives thereof, Scr7, and any combination thereof. In some embodiments, said at least one exogenously added protein involved in DNA double strand break repair comprises RS-1, RAD51, or both.

[0165] In some embodiments, said at least one exogenously-added immune stimulatory agent comprises B7, CD80, CD83, CD86, CD32, CD64, 4-1BBL, anti-CD3, anti-CD3 mAb, S-2-hydroxyglutarate, anti-CD28, anti-CD28 mAb, CD1d, anti-CD2, IL-15, IL-17, IL-21, IL-2, IL-7, truncated CD19, derivative thereof, or any combination. In some embodiments, said at least one exogenously-added immune stimulatory agent comprises IL-2, IL-7, IL-15, or any combination thereof. In some embodiments, said at least one exogenously-added immune stimulatory agent is configured to stimulate expansion of at least a portion of said cell population or said cells.

[0166] In some embodiments, said primary immune cells comprises a cell selected from the group consisting of: a B cell, a basophil, a dendritic cell, an eosinophil, a gamma delta T cell, a granulocyte, a helper T cell, a Langerhans cell, a lymphoid cell, an innate lymphoid cell (ILC), a macrophage, a mast cell, a megakaryocyte, a memory T cell, a monocyte, a myeloid cell, a natural killer T cell, a neutrophil, a precursor cell, a plasma cell, a progenitor cell, a regulatory T-cell, a T cell, a thymocyte, any differentiated or de-differentiated cell thereof, or any mixture or combination of cells thereof. In some embodiments, said primary immune cells comprise primary T cells.

[0167] In some embodiments, said primary T cells are isolated from a blood sample of a subject. In some embodiments, said subject is a human. In some embodiments, said blood sample is a whole blood sample or a fractioned blood sample. In some embodiments, said blood sample comprises isolated peripheral blood mononuclear cells.

[0168] In some embodiments, said primary T cells comprise a gamma delta T cell, a helper T cell, a memory T cell, a natural killer T cell, an effector T cell, or any combination thereof.

[0169] In some embodiments, said primary immune cells comprise CD3+ cells. In some embodiments, said primary immune cells comprise tumor infiltrating lymphocytes (TILs). In some embodiments, the TILs comprise T cells, B cells, natural killer cells, macrophages, differentiated or de-differentiated cell thereof, or any combination thereof.

[0170] In some embodiments, the composition further comprises antigen-presenting cells (APCs). In some embodiments, said APCs are configured to stimulate expansion of said TILs. In some embodiments, said APCs express B7, CD80, CD83, CD86, CD32, CD64, 4-1BBL, anti-CD3, anti-CD3 mAb, S-2-hydroxyglutarate, anti-CD28, anti-CD28 mAb, CD1d, anti-CD2, membrane-bound IL-15, membrane-bound IL-17, membrane-bound IL-21, membrane-bound IL-2, truncated CD19, derivative thereof, or any combination thereof.

[0171] In some embodiments, said genetically modified cells comprise disruption of one or more genomic sites. In some embodiments, said genetically modified cells comprise a modification or deletion of one or more endogenous gene. In some embodiments, said endogenous gene comprises an immune checkpoint gene. In some embodiments, said endogenous gene comprises CISH, PD-1, or both.

[0172] In some embodiments, nuclei of said genetically modified cells comprise a transgene.

[0173] In some embodiments, said transgene codes for a protein selected from the group consisting of: a cellular receptor, an immunological checkpoint protein, a cytokine, and any combination thereof. In some embodiments, said transgene codes for a cellular receptor selected from the group consisting of: a T cell receptor (TCR), a B cell receptor (BCR), a chimeric antigen receptor (CAR), or any combination thereof. In some embodiments, said transgene codes for a T cell receptor.

[0174] In one aspect, provided herein are compositions comprising: genetically modified cells; DNase; and a substantially antibiotic-free media.

[0175] In some embodiments, the nuclei of said genetically modified cells comprise at least one exogenously added modulator of DNA double strand break repair. In some embodiments, the composition is substantially antibiotic-free media.

[0176] In some embodiments, said cell population comprises primary cells. In some embodiments, said cell population comprises primary immune cells. In some embodiments, said composition further comprises at least one exogenously-added immune stimulatory agent. In some embodiments, said at least one exogenously-added immune stimulatory agent is present at a concentration from about 50 IU/ml to about 1000 IU/ml.

[0177] In some embodiments, said DNase is present at a concentration from about 5 μg/ml to about 15 μg/ml. In some embodiments, said DNase is selected from the group consisting of: DNase I, Benzonase, Exonuclease I, Exonuclease III, Mung Bean Nuclease, Nuclease BAL 31, RNase I, S1 Nuclease, Lambda Exonuclease, RecJ, T7 exonuclease, restriction enzymes, and any combination thereof. In some embodiments, said DNase comprises DNase I.

[0178] In some embodiments, said at least one exogenously added modulator of DNA double strand break repair comprises NAC, anti-IFNAR2 antibody, or both. In some embodiments, said at least one exogenously added modulator of DNA double strand break repair comprises a protein involved in DNA double strand break repair. In some embodiments, the protein involved in DNA double strand break repair comprises a protein selected from the group consisting of: Ku70, Ku80, BRCA1, BRCA2, RAD51, RS-1, PALB2, Nap1, p400 ATPase, EVL, NAC, MRE11, RAD50, RAD52, RAD55, RAD57, RAD54, RAD54B, Srs2, NBS1, H2AX, PARP-1, RAD18, DNA-PKcs, XRCC4, XLF, Artemis, TdT, pol μ and pol λ, ATM, AKT1, AKT2, AKT3, Nibrin, CtIP, EXO1, BLM, E4 orf6, E1b55K, homologs and derivatives thereof, Scr7, and any combination thereof. In some embodiments, said at least one exogenously added protein involved in DNA double strand break repair comprises RS-1, RAD51, or both.

[0179] In some embodiments, said at least one exogenously-added immune stimulatory agent comprises B7, CD80, CD83, CD86, CD32, CD64, 4-1BBL, anti-CD3, anti-CD3 mAb, S-2-hydroxyglutarate, anti-CD28, anti-CD28 mAb, CD1d, anti-CD2, IL-15, IL-17, IL-21, IL-2, IL-7, truncated CD19, derivative thereof, or any combination. In some embodiments, said at least one exogenously-added immune stimulatory agent comprises IL-2, IL-7, IL-15, or any combination thereof. In some embodiments, said at least one exogenously-added immune stimulatory agent is configured to stimulate expansion of at least a portion of said cell population or said cells.

[0180] In some embodiments, said primary immune cells comprises a cell selected from the group consisting of a B cell, a basophil, a dendritic cell, an eosinophil, a gamma delta T cell, a granulocyte, a helper T cell, a Langerhans cell, a lymphoid cell, an innate lymphoid cell (ILC), a macrophage, a mast cell, a megakaryocyte, a memory T cell, a monocyte, a myeloid cell, a natural killer T cell, a neutrophil, a precursor cell, a plasma cell, a progenitor cell, a regulatory T-cell, a T cell, a thymocyte, any differentiated or de-differentiated cell thereof, or any mixture or combination of cells thereof. In some embodiments, said primary immune cells comprise primary T cells.

[0181] In some embodiments, said primary T cells are isolated from a blood sample of a subject. In some embodiments, said subject is a human. In some embodiments, said blood sample is a whole blood sample or a fractioned blood sample. In some embodiments, said blood sample comprises isolated peripheral blood mononuclear cells.

[0182] In some embodiments, said primary T cells comprise a gamma delta T cell, a helper T cell, a memory T cell, a natural killer T cell, an effector T cell, or any combination thereof.

[0183] In some embodiments, said primary immune cells comprise CD3+ cells. In some embodiments, said primary immune cells comprise tumor infiltrating lymphocytes (TILs). In some embodiments, the TILs comprise T cells, B cells, natural killer cells, macrophages, differentiated or de-differentiated cell thereof, or any combination thereof.

[0184] In some embodiments, the composition further comprises antigen-presenting cells (APCs). In some embodiments, said APCs are configured to stimulate expansion of said TILs. In some embodiments, said APCs express B7, CD80, CD83, CD86, CD32, CD64, 4-1BBL, anti-CD3, anti-CD3 mAb, S-2-hydroxyglutarate, anti-CD28, anti-CD28 mAb, CD1d, anti-CD2, membrane-bound IL-15, membrane-bound IL-17, membrane-bound IL-21, membrane-bound IL-2, truncated CD19, derivative thereof, or any combination thereof.

[0185] In some embodiments, said genetically modified cells comprise disruption of one or more genomic sites. In some embodiments, said genetically modified cells comprise a modification or deletion of one or more endogenous gene. In some embodiments, said endogenous gene comprises an immune checkpoint gene. In some embodiments, said endogenous gene comprises CISH, PD-1, or both.

[0186] In some embodiments, nuclei of said genetically modified cells comprise a transgene.

[0187] In some embodiments, said transgene codes for a protein selected from the group consisting of: a cellular receptor, an immunological checkpoint protein, a cytokine, and any combination thereof. In some embodiments, said transgene codes for a cellular receptor selected from the group consisting of: a T cell receptor (TCR), a B cell receptor (BCR), a chimeric antigen receptor (CAR), or any combination thereof. In some embodiments, said transgene codes for a T cell receptor.

[0188] In one aspect, provided here are compositions comprising: genetically modified primary immune cells; DNase; and at least one exogenously-added immune stimulatory agent.

[0189] In some embodiments, the nuclei of at least a portion of said cell population comprise at least one exogenously added modulator of DNA double strand break repair. In some embodiments, the composition is substantially antibiotic-free media.

[0190] In some embodiments, said cell population comprises primary cells. In some embodiments, said cell population comprises primary immune cells. In some embodiments, said composition further comprises at least one exogenously-added immune stimulatory agent. In some embodiments, said at least one exogenously-added immune stimulatory agent is present at a concentration from about 50 IU/ml to about 1000 IU/ml.

[0191] In some embodiments, said DNase is present at a concentration from about 5 μg/ml to about 15 μg/ml. In some embodiments, said DNase is selected from the group consisting of: DNase I, Benzonase, Exonuclease I, Exonuclease III, Mung Bean Nuclease, Nuclease BAL 31, RNase I, S1 Nuclease, Lambda Exonuclease, RecJ, T7 exonuclease, restriction enzymes, and any combination thereof. In some embodiments, said DNase comprises DNase I.

[0192] In some embodiments, said at least one exogenously added modulator of DNA double strand break repair comprises NAC, anti-IFNAR2 antibody, or both. In some embodiments, said at least one exogenously added modulator of DNA double strand break repair comprises a protein involved in DNA double strand break repair. In some embodiments, the protein involved in DNA double strand break repair comprises a protein selected from the group consisting of: Ku70, Ku80, BRCA1, BRCA2, RAD51, RS-1, PALB2, Nap1, p400 ATPase, EVL, NAC, MRE11, RAD50, RAD52, RAD55, RAD57, RAD54, RAD54B, Srs2, NBS1, H2AX, PARP-1, RAD18, DNA-PKcs, XRCC4, XLF, Artemis, TdT, pol μ and pol λ, ATM, AKT1, AKT2, AKT3, Nibrin, CtIP, EXO1, BLM, E4 orf6, E1b55K, homologs and derivatives thereof, Scr7, and any combination thereof. In some embodiments, said at least one exogenously added protein involved in DNA double strand break repair comprises RS-1, RAD51, or both.

[0193] In some embodiments, said at least one exogenously-added immune stimulatory agent comprises B7, CD80, CD83, CD86, CD32, CD64, 4-1BBL, anti-CD3, anti-CD3 mAb, S-2-hydroxyglutarate, anti-CD28, anti-CD28 mAb, CD1d, anti-CD2, IL-15, IL-17, IL-21, IL-2, IL-7, truncated CD19, derivative thereof, or any combination. In some embodiments, said at least one exogenously-added immune stimulatory agent comprises IL-2, IL-7, IL-15, or any combination thereof. In some embodiments, said at least one exogenously-added immune stimulatory agent is configured to stimulate expansion of at least a portion of said cell population or said cells.

[0194] In some embodiments, said primary immune cells comprises a cell selected from the group consisting of a B cell, a basophil, a dendritic cell, an eosinophil, a gamma delta T cell, a granulocyte, a helper T cell, a Langerhans cell, a lymphoid cell, an innate lymphoid cell (ILC), a macrophage, a mast cell, a megakaryocyte, a memory T cell, a monocyte, a myeloid cell, a natural killer T cell, a neutrophil, a precursor cell, a plasma cell, a progenitor cell, a regulatory T-cell, a T cell, a thymocyte, any differentiated or de-differentiated cell thereof, or any mixture or combination of cells thereof. In some embodiments, said primary immune cells comprise primary T cells.

[0195] In some embodiments, said primary T cells are isolated from a blood sample of a subject. In some embodiments, said subject is a human. In some embodiments, said blood sample is a whole blood sample or a fractioned blood sample. In some embodiments, said blood sample comprises isolated peripheral blood mononuclear cells.

[0196] In some embodiments, said primary T cells comprise a gamma delta T cell, a helper T cell, a memory T cell, a natural killer T cell, an effector T cell, or any combination thereof.

[0197] In some embodiments, said primary immune cells comprise CD3+ cells. In some embodiments, said primary immune cells comprise tumor infiltrating lymphocytes (TILs). In some embodiments, the TILs comprise T cells, B cells, natural killer cells, macrophages, differentiated or de-differentiated cell thereof, or any combination thereof.

[0198] In some embodiments, the composition further comprises antigen-presenting cells (APCs). In some embodiments, said APCs are configured to stimulate expansion of said TILs. In some embodiments, said APCs express B7, CD80, CD83, CD86, CD32, CD64, 4-1BBL, anti-CD3, anti-CD3 mAb, S-2-hydroxyglutarate, anti-CD28, anti-CD28 mAb, CD1d, anti-CD2, membrane-bound IL-15, membrane-bound IL-17, membrane-bound IL-21, membrane-bound IL-2, truncated CD19, derivative thereof, or any combination thereof.

[0199] In some embodiments, said genetically modified cells comprise disruption of one or more genomic sites. In some embodiments, said genetically modified cells comprise a modification or deletion of one or more endogenous gene. In some embodiments, said endogenous gene comprises an immune checkpoint gene. In some embodiments, said endogenous gene comprises CISH, PD-1, or both.

[0200] In some embodiments, nuclei of said genetically modified cells comprise a transgene.

[0201] In some embodiments, said transgene codes for a protein selected from the group consisting of: a cellular receptor, an immunological checkpoint protein, a cytokine, and any combination thereof. In some embodiments, said transgene codes for a cellular receptor selected from the group consisting of: a T cell receptor (TCR), a B cell receptor (BCR), a chimeric antigen receptor (CAR), or any combination thereof. In some embodiments, said transgene codes for a T cell receptor.

[0202] In one aspect, provided herein are compositions comprising: genetically modified primary immune cells; DNase; and at least one exogenously-added immune stimulatory agent at a concentration from about 50 IU/ml to about 1000 IU/ml.

[0203] In some embodiments, the nuclei of at least a portion of said cell population comprise at least one exogenously added modulator of DNA double strand break repair. In some embodiments, the composition is substantially antibiotic-free media.

[0204] In some embodiments, said cell population comprises primary cells. In some embodiments, said cell population comprises primary immune cells. In some embodiments, said composition further comprises at least one exogenously-added immune stimulatory agent. In some embodiments, said at least one exogenously-added immune stimulatory agent is present at a concentration from about 50 IU/ml to about 1000 IU/ml.

[0205] In some embodiments, said DNase is present at a concentration from about 5 μg/ml to about 15 μg/ml. In some embodiments, said DNase is selected from the group consisting of: DNase I, Benzonase, Exonuclease I, Exonuclease III, Mung Bean Nuclease, Nuclease BAL 31, RNase I, S1 Nuclease, Lambda Exonuclease, RecJ, T7 exonuclease, restriction enzymes, and any combination thereof. In some embodiments, said DNase comprises DNase I.

[0206] In some embodiments, said at least one exogenously added modulator of DNA double strand break repair comprises NAC, anti-IFNAR2 antibody, or both. In some embodiments, said at least one exogenously added modulator of DNA double strand break repair comprises a protein involved in DNA double strand break repair. In some embodiments, the protein involved in DNA double strand break repair comprises a protein selected from the group consisting of: Ku70, Ku80, BRCA1, BRCA2, RAD51, RS-1, PALB2, Nap1, p400 ATPase, EVL, NAC, MRE11, RAD50, RAD52, RAD55, RAD57, RAD54, RAD54B, Srs2, NBS1, H2AX, PARP-1, RAD18, DNA-PKcs, XRCC4, XLF, Artemis, TdT, pol μ and pol λ, ATM, AKT1, AKT2, AKT3, Nibrin, CtIP, EXO1, BLM, E4 orf6, E1b55K, homologs and derivatives thereof, Scr7, and any combination thereof. In some embodiments, said at least one exogenously added protein involved in DNA double strand break repair comprises RS-1, RAD51, or both.

[0207] In some embodiments, said at least one exogenously-added immune stimulatory agent comprises B7, CD80, CD83, CD86, CD32, CD64, 4-1BBL, anti-CD3, anti-CD3 mAb, S-2-hydroxyglutarate, anti-CD28, anti-CD28 mAb, CD1d, anti-CD2, IL-15, IL-17, IL-21, IL-2, IL-7, truncated CD19, derivative thereof, or any combination. In some embodiments, said at least one exogenously-added immune stimulatory agent comprises IL-2, IL-7, IL-15, or any combination thereof. In some embodiments, said at least one exogenously-added immune stimulatory agent is configured to stimulate expansion of at least a portion of said cell population or said cells.

[0208] In some embodiments, said primary immune cells comprises a cell selected from the group consisting of: a B cell, a basophil, a dendritic cell, an eosinophil, a gamma delta T cell, a granulocyte, a helper T cell, a Langerhans cell, a lymphoid cell, an innate lymphoid cell (ILC), a macrophage, a mast cell, a megakaryocyte, a memory T cell, a monocyte, a myeloid cell, a natural killer T cell, a neutrophil, a precursor cell, a plasma cell, a progenitor cell, a regulatory T-cell, a T cell, a thymocyte, any differentiated or de-differentiated cell thereof, or any mixture or combination of cells thereof. In some embodiments, said primary immune cells comprise primary T cells.

[0209] In some embodiments, said primary T cells are isolated from a blood sample of a subject. In some embodiments, said subject is a human. In some embodiments, said blood sample is a whole blood sample or a fractioned blood sample. In some embodiments, said blood sample comprises isolated peripheral blood mononuclear cells.

[0210] In some embodiments, said primary T cells comprise a gamma delta T cell, a helper T cell, a memory T cell, a natural killer T cell, an effector T cell, or any combination thereof.

[0211] In some embodiments, said primary immune cells comprise CD3+ cells. In some embodiments, said primary immune cells comprise tumor infiltrating lymphocytes (TILs). In some embodiments, the TILs comprise T cells, B cells, natural killer cells, macrophages, differentiated or de-differentiated cell thereof, or any combination thereof.

[0212] In some embodiments, the composition further comprises antigen-presenting cells (APCs). In some embodiments, said APCs are configured to stimulate expansion of said TILs. In some embodiments, said APCs express B7, CD80, CD83, CD86, CD32, CD64, 4-1BBL, anti-CD3, anti-CD3 mAb, S-2-hydroxyglutarate, anti-CD28, anti-CD28 mAb, CD1d, anti-CD2, membrane-bound IL-15, membrane-bound IL-17, membrane-bound IL-21, membrane-bound IL-2, truncated CD19, derivative thereof, or any combination thereof.

[0213] In some embodiments, said genetically modified cells comprise disruption of one or more genomic sites. In some embodiments, said genetically modified cells comprise a modification or deletion of one or more endogenous gene. In some embodiments, said endogenous gene comprises an immune checkpoint gene. In some embodiments, said endogenous gene comprises CISH, PD-1, or both.

[0214] In some embodiments, nuclei of said genetically modified cells comprise a transgene.

[0215] In some embodiments, said transgene codes for a protein selected from the group consisting of: a cellular receptor, an immunological checkpoint protein, a cytokine, and any combination thereof. In some embodiments, said transgene codes for a cellular receptor selected from the group consisting of: a T cell receptor (TCR), a B cell receptor (BCR), a chimeric antigen receptor (CAR), or any combination thereof. In some embodiments, said transgene codes for a T cell receptor.

[0216] In one aspect, provided herein are methods of increasing transgene expression of engineered cells comprising: introducing to a population of primary immune cells an exogenous polynucleic acid that encodes a transgene thereby generating a population of modified primary immune cells; and contacting said population of modified primary immune cells with a DNase and an immune stimulatory agent; wherein said contacting results in an increase in a percentage of cells that express said transgene encoded by said exogenous polynucleic acid as compared to a comparable population of modified primary immune cells to which only one of said DNase or said immune stimulatory agent is contacted.

[0217] In some embodiments, the nuclei of at least a portion of said cell population comprise at least one exogenously added modulator of DNA double strand break repair. In some embodiments, the composition is substantially antibiotic-free media.

[0218] In some embodiments, said cells are primary cells. In some embodiments, said at least one exogenously-added immune stimulatory agent is present at a concentration from about 50 IU/ml to about 1000 IU/ml.

[0219] In some embodiments, said DNase is added at a concentration from about 5 μg/ml to about 15 μg/ml. In some embodiments, said DNase is selected from the group consisting of: DNase I, Benzonase, Exonuclease I, Exonuclease III, Mung Bean Nuclease, Nuclease BAL 31, RNase I, S1 Nuclease, Lambda Exonuclease, RecJ, T7 exonuclease, restriction enzymes, and any combination thereof. In some embodiments, said DNase comprises DNase I.

[0220] In some embodiments, said at least one exogenously added modulator of DNA double strand break repair comprises NAC, anti-IFNAR2 antibody, or both. In some embodiments, said at least one exogenously added modulator of DNA double strand break repair comprises a protein involved in DNA double strand break repair. In some embodiments, the protein involved in DNA double strand break repair comprises a protein selected from the group consisting of: Ku70, Ku80, BRCA1, BRCA2, RAD51, RS-1, PALB2, Nap1, p400 ATPase, EVL, NAC, MRE11, RAD50, RAD52, RAD55, RAD57, RAD54, Srs2, NBS1, H2AX, PARP-1, RAD18, DNA-PKcs, XRCC4, XLF, Artemis, TdT, pol μ and pol λ, ATM, AKT1, AKT2, AKT3, Nibrin, CtIP, EXO1, BLM, E4 orf6, E1b55K, homologs and derivatives thereof, Scr7, and any combination thereof. In some embodiments, said at least one exogenously added protein involved in DNA double strand break repair comprises RS-1, RAD51, or both.

[0221] In some embodiments, said at least one exogenously-added immune stimulatory agent comprises B7, CD80, CD83, CD86, CD32, CD64, 4-1BBL, anti-CD3, anti-CD3 mAb, S-2-hydroxyglutarate, anti-CD28, anti-CD28 mAb, CD1d, anti-CD2, IL-15, IL-17, IL-21, IL-2, IL-7, truncated CD19, derivative thereof, or any combination. In some embodiments, said at least one exogenously-added immune stimulatory agent comprises IL-2, IL-7, IL-15, or any combination thereof. In some embodiments, said at least one exogenously-added immune stimulatory agent is configured to stimulate expansion of at least a portion of said cell population or said cells.

[0222] In some embodiments, said primary immune cells comprises a cell selected from the group consisting of: a B cell, a basophil, a dendritic cell, an eosinophil, a gamma delta T cell, a granulocyte, a helper T cell, a Langerhans cell, a lymphoid cell, an innate lymphoid cell (ILC), a macrophage, a mast cell, a megakaryocyte, a memory T cell, a monocyte, a myeloid cell, a natural killer T cell, a neutrophil, a precursor cell, a plasma cell, a progenitor cell, a regulatory T-cell, a T cell, a thymocyte, any differentiated or de-differentiated cell thereof, or any mixture or combination of cells thereof. In some embodiments, said primary immune cells comprise primary T cells.

[0223] In some embodiments, said primary T cells are isolated from a blood sample of a subject. In some embodiments, said subject is a human. In some embodiments, said blood sample is a whole blood sample or a fractioned blood sample. In some embodiments, said blood sample comprises isolated peripheral blood mononuclear cells.

[0224] In some embodiments, said primary T cells comprise a gamma delta T cell, a helper T cell, a memory T cell, a natural killer T cell, an effector T cell, or any combination thereof.

[0225] In some embodiments, said primary immune cells comprise CD3+ cells. In some embodiments, said primary immune cells comprise tumor infiltrating lymphocytes (TILs). In some embodiments, the TILs comprise T cells, B cells, natural killer cells, macrophages, differentiated or de-differentiated cell thereof, or any combination thereof.

[0226] In some embodiments, the composition further comprises antigen-presenting cells (APCs). In some embodiments, said APCs are configured to stimulate expansion of said TILs. In some embodiments, said APCs express B7, CD80, CD83, CD86, CD32, CD64, 4-1BBL, anti-CD3, anti-CD3 mAb, S-2-hydroxyglutarate, anti-CD28, anti-CD28 mAb, CD1d, anti-CD2, membrane-bound IL-15, membrane-bound IL-17, membrane-bound IL-21, membrane-bound IL-2, truncated CD19, derivative thereof, or any combination thereof.

[0227] In some embodiments, said genetically modified cells comprise disruption of one or more genomic sites. In some embodiments, said genetically modified cells comprise a modification or deletion of one or more endogenous gene. In some embodiments, said endogenous gene comprises an immune checkpoint gene. In some embodiments, said endogenous gene comprises CISH, PD-1, or both. In some embodiments, said endogenous gene comprises a T cell receptor gene. In some embodiments, said endogenous gene comprises TRAC, TCRB, or both. In some embodiments, said endogenous gene comprises a T cell receptor and an immune checkpoint gene.

[0228] In some embodiments, nuclei of said genetically modified cells comprise a transgene.

[0229] In some embodiments, said transgene codes for a protein selected from the group consisting of: a cellular receptor, an immunological checkpoint protein, a cytokine, and any combination thereof. In some embodiments, said transgene codes for a cellular receptor selected from the group consisting of: a T cell receptor (TCR), a B cell receptor (BCR), a chimeric antigen receptor (CAR), or any combination thereof. In some embodiments, said transgene codes for a T cell receptor.

[0230] In one aspect, provided herein are methods of increasing viability of engineered cells comprising: introducing to a population of primary immune cells an exogenous polynucleic acid that encodes a transgene thereby generating a population of modified primary immune cells; and contacting said population of modified primary immune cells with a DNase and an immune stimulatory agent; wherein said contacting results in an increase in a percentage of viable cells that express said transgene encoded by said exogenous polynucleic acid as compared to a comparable population of modified primary immune cells to which only one of said DNase or said immune stimulatory agent is contacted.

[0231] In some embodiments, contacting with said DNase and with said immune stimulatory agent take place simultaneously.

[0232] In some embodiments, the nuclei of at least a portion of said cell population comprise at least one exogenously added modulator of DNA double strand break repair. In some embodiments, the composition is substantially antibiotic-free media.

[0233] In some embodiments, said cells are primary cells. In some embodiments, said at least one exogenously-added immune stimulatory agent is present at a concentration from about 50 IU/ml to about 1000 IU/ml.

[0234] In some embodiments, said DNase is added at a concentration from about 5 μg/ml to about 15 μg/ml. In some embodiments, said DNase is selected from the group consisting of: DNase I, Benzonase, Exonuclease I, Exonuclease III, Mung Bean Nuclease, Nuclease BAL 31, RNase I, S1 Nuclease, Lambda Exonuclease, RecJ, T7 exonuclease, restriction enzymes, and any combination thereof. In some embodiments, said DNase comprises DNase I.

[0235] In some embodiments, said at least one exogenously added modulator of DNA double strand break repair comprises NAC, anti-IFNAR2 antibody, or both. In some embodiments, said at least one exogenously added modulator of DNA double strand break repair comprises a protein involved in DNA double strand break repair. In some embodiments, the protein involved in DNA double strand break repair comprises a protein selected from the group consisting of: Ku70, Ku80, BRCA1, BRCA2, RAD51, RS-1, PALB2, Nap1, p400 ATPase, EVL, NAC, MRE11, RAD50, RAD52, RAD55, RAD57, RAD54, RAD54B, Srs2, NBS1, H2AX, PARP-1, RAD18, DNA-PKcs, XRCC4, XLF, Artemis, TdT, pol μ and pol λ, ATM, AKT1, AKT2, AKT3, Nibrin, CtIP, EXO1, BLM, E4 orf6, E1b55K, homologs and derivatives thereof, Scr7, and any combination thereof. In some embodiments, said at least one exogenously added protein involved in DNA double strand break repair comprises RS-1, RAD51, or both.

[0236] In some embodiments, said at least one exogenously-added immune stimulatory agent comprises B7, CD80, CD83, CD86, CD32, CD64, 4-1BBL, anti-CD3, anti-CD3 mAb, S-2-hydroxyglutarate, anti-CD28, anti-CD28 mAb, CD1d, anti-CD2, IL-15, IL-17, IL-21, IL-2, IL-7, truncated CD19, derivative thereof, or any combination. In some embodiments, said at least one exogenously-added immune stimulatory agent comprises IL-2, IL-7, IL-15, or any combination thereof. In some embodiments, said at least one exogenously-added immune stimulatory agent is configured to stimulate expansion of at least a portion of said cell population or said cells.

[0237] In some embodiments, said primary immune cells comprises a cell selected from the group consisting of a B cell, a basophil, a dendritic cell, an eosinophil, a gamma delta T cell, a granulocyte, a helper T cell, a Langerhans cell, a lymphoid cell, an innate lymphoid cell (ILC), a macrophage, a mast cell, a megakaryocyte, a memory T cell, a monocyte, a myeloid cell, a natural killer T cell, a neutrophil, a precursor cell, a plasma cell, a progenitor cell, a regulatory T-cell, a T cell, a thymocyte, any differentiated or de-differentiated cell thereof, or any mixture or combination of cells thereof. In some embodiments, said primary immune cells comprise primary T cells.

[0238] In some embodiments, said primary T cells are isolated from a blood sample of a subject. In some embodiments, said subject is a human. In some embodiments, said blood sample is a whole blood sample or a fractioned blood sample. In some embodiments, said blood sample comprises isolated peripheral blood mononuclear cells.

[0239] In some embodiments, said primary T cells comprise a gamma delta T cell, a helper T cell, a memory T cell, a natural killer T cell, an effector T cell, or any combination thereof.

[0240] In some embodiments, said primary immune cells comprise CD3+ cells. In some embodiments, said primary immune cells comprise tumor infiltrating lymphocytes (TILs). In some embodiments, the TILs comprise T cells, B cells, natural killer cells, macrophages, differentiated or de-differentiated cell thereof, or any combination thereof.

[0241] In some embodiments, the composition further comprises antigen-presenting cells (APCs). In some embodiments, said APCs are configured to stimulate expansion of said TILs. In some embodiments, said APCs express B7, CD80, CD83, CD86, CD32, CD64, 4-1BBL, anti-CD3, anti-CD3 mAb, S-2-hydroxyglutarate, anti-CD28, anti-CD28 mAb, CD1d, anti-CD2, membrane-bound IL-15, membrane-bound IL-17, membrane-bound IL-21, membrane-bound IL-2, truncated CD19, derivative thereof, or any combination thereof.

[0242] In some embodiments, said genetically modified cells comprise disruption of one or more genomic sites. In some embodiments, said genetically modified cells comprise a modification or deletion of one or more endogenous gene. In some embodiments, said endogenous gene comprises an immune checkpoint gene. In some embodiments, said endogenous gene comprises CISH, PD-1, TRAC, TCRB, or any combination thereof.

[0243] In some embodiments, nuclei of said genetically modified cells comprise a transgene.

[0244] In some embodiments, said transgene codes for a protein selected from the group consisting of: a cellular receptor, an immunological checkpoint protein, a cytokine, and any combination thereof. In some embodiments, said transgene codes for a cellular receptor selected from the group consisting of: a T cell receptor (TCR), a B cell receptor (BCR), a chimeric antigen receptor (CAR), or any combination thereof. In some embodiments, said transgene codes for a T cell receptor.

[0245] In one aspect, provided herein are methods of increasing cellular viability of engineered cells comprising: introducing to a population of primary immune cells an exogenous polynucleic acid that encodes a transgene thereby generating a population of modified primary immune cells; and contacting said population of modified primary immune cells with a DNase; wherein said contacting results in an increase in a percentage of viable cells that express said transgene as encoded by said exogenous polynucleic acid in said population as compared to a comparable population of modified primary immune cells to which said introducing but not said contacting is performed.

[0246] In some embodiments, the nuclei of at least a portion of said cell population comprise at least one exogenously added modulator of DNA double strand break repair. In some embodiments, the composition is substantially antibiotic-free media.

[0247] In some embodiments, said cells are primary cells. In some embodiments, said at least one exogenously-added immune stimulatory agent is present at a concentration from about 50 IU/ml to about 1000 IU/ml.

[0248] In some embodiments, said DNase is added at a concentration from about 5 μg/ml to about 15 μg/ml. In some embodiments, said DNase is selected from the group consisting of: DNase I, Benzonase, Exonuclease I, Exonuclease III, Mung Bean Nuclease, Nuclease BAL 31, RNase I, S1 Nuclease, Lambda Exonuclease, RecJ, T7 exonuclease, restriction enzymes, and any combination thereof. In some embodiments, said DNase comprises DNase I.

[0249] In some embodiments, said at least one exogenously added modulator of DNA double strand break repair comprises NAC, anti-IFNAR2 antibody, or both. In some embodiments, said at least one exogenously added modulator of DNA double strand break repair comprises a protein involved in DNA double strand break repair. In some embodiments, the protein involved in DNA double strand break repair comprises a protein selected from the group consisting of: Ku70, Ku80, BRCA1, BRCA2, RAD51, RS-1, PALB2, Nap1, p400 ATPase, EVL, NAC, MRE11, RAD50, RAD52, RAD55, RAD57, RAD54, RAD54B, Srs2, NBS1, H2AX, PARP-1, RAD18, DNA-PKcs, XRCC4, XLF, Artemis, TdT, pol μ and pol λ, ATM, AKT1, AKT2, AKT3, Nibrin, CtIP, EXO1, BLM, E4 orf6, E1b55K, homologs and derivatives thereof, Scr7, and any combination thereof. In some embodiments, said at least one exogenously added protein involved in DNA double strand break repair comprises RS-1, RAD51, or both.

[0250] In some embodiments, said at least one exogenously-added immune stimulatory agent comprises B7, CD80, CD83, CD86, CD32, CD64, 4-1BBL, anti-CD3, anti-CD3 mAb, S-2-hydroxyglutarate, anti-CD28, anti-CD28 mAb, CD1d, anti-CD2, IL-15, IL-17, IL-21, IL-2, IL-7, truncated CD19, derivative thereof, or any combination. In some embodiments, said at least one exogenously-added immune stimulatory agent comprises IL-2, IL-7, IL-15, or any combination thereof. In some embodiments, said at least one exogenously-added immune stimulatory agent is configured to stimulate expansion of at least a portion of said cell population or said cells.

[0251] In some embodiments, said primary immune cells comprises a cell selected from the group consisting of: a B cell, a basophil, a dendritic cell, an eosinophil, a gamma delta T cell, a granulocyte, a helper T cell, a Langerhans cell, a lymphoid cell, an innate lymphoid cell (ILC), a macrophage, a mast cell, a megakaryocyte, a memory T cell, a monocyte, a myeloid cell, a natural killer T cell, a neutrophil, a precursor cell, a plasma cell, a progenitor cell, a regulatory T-cell, a T cell, a thymocyte, any differentiated or de-differentiated cell thereof, or any mixture or combination of cells thereof. In some embodiments, said primary immune cells comprise primary T cells.

[0252] In some embodiments, said primary T cells are isolated from a blood sample of a subject. In some embodiments, said subject is a human. In some embodiments, said blood sample is a whole blood sample or a fractioned blood sample. In some embodiments, said blood sample comprises isolated peripheral blood mononuclear cells.

[0253] In some embodiments, said primary T cells comprise a gamma delta T cell, a helper T cell, a memory T cell, a natural killer T cell, an effector T cell, or any combination thereof.

[0254] In some embodiments, said primary immune cells comprise CD3+ cells. In some embodiments, said primary immune cells comprise tumor infiltrating lymphocytes (TILs). In some embodiments, the TILs comprise T cells, B cells, natural killer cells, macrophages, differentiated or de-differentiated cell thereof, or any combination thereof.

[0255] In some embodiments, the composition further comprises antigen-presenting cells (APCs). In some embodiments, said APCs are configured to stimulate expansion of said TILs. In some embodiments, said APCs express B7, CD80, CD83, CD86, CD32, CD64, 4-1BBL, anti-CD3, anti-CD3 mAb, S-2-hydroxyglutarate, anti-CD28, anti-CD28 mAb, CD1d, anti-CD2, membrane-bound IL-15, membrane-bound IL-17, membrane-bound IL-21, membrane-bound IL-2, truncated CD19, derivative thereof, or any combination thereof.

[0256] In some embodiments, said genetically modified cells comprise disruption of one or more genomic sites. In some embodiments, said genetically modified cells comprise a modification or deletion of one or more endogenous gene. In some embodiments, said endogenous gene comprises an immune checkpoint gene. In some embodiments, said endogenous gene comprises CISH, PD-1, TRAC, TCRB, or any combination thereof.

[0257] In some embodiments, nuclei of said genetically modified cells comprise a transgene.

[0258] In some embodiments, said transgene codes for a protein selected from the group consisting of: a cellular receptor, an immunological checkpoint protein, a cytokine, and any combination thereof. In some embodiments, said transgene codes for a cellular receptor selected from the group consisting of: a T cell receptor (TCR), a B cell receptor (BCR), a chimeric antigen receptor (CAR), or any combination thereof. In some embodiments, said transgene codes for a T cell receptor.

[0259] In one aspect, provided herein are methods of increasing transgene expression of engineered cells comprising: introducing to a population of primary immune cells an exogenous polynucleic acid that encodes a transgene thereby generating a population of modified primary immune cells; and contacting said population of primary immune cells with a DNase; wherein said contacting results in an increase in a percentage of cells that express said transgene encoded by said exogenous polynucleic acid as compared to a comparable population of modified primary immune cells to which said introducing but not said contacting is performed.

[0260] In some embodiments, the nuclei of at least a portion of said cell population comprise at least one exogenously added modulator of DNA double strand break repair. In some embodiments, the composition is substantially antibiotic-free media.

[0261] In some embodiments, said cells are primary cells. In some embodiments, said at least one exogenously-added immune stimulatory agent is present at a concentration from about 50 IU/ml to about 1000 IU/ml.

[0262] In some embodiments, said DNase is added at a concentration from about 5 μg/ml to about 15 μg/ml. In some embodiments, said DNase is selected from the group consisting of: DNase I, Benzonase, Exonuclease I, Exonuclease III, Mung Bean Nuclease, Nuclease BAL 31, RNase I, S1 Nuclease, Lambda Exonuclease, RecJ, T7 exonuclease, restriction enzymes, and any combination thereof. In some embodiments, said DNase comprises DNase I.

[0263] In some embodiments, said at least one exogenously added modulator of DNA double strand break repair comprises NAC, anti-IFNAR2 antibody, or both. In some embodiments, said at least one exogenously added modulator of DNA double strand break repair comprises a protein involved in DNA double strand break repair. In some embodiments, the protein involved in DNA double strand break repair comprises a protein selected from the group consisting of: Ku70, Ku80, BRCA1, BRCA2, RAD51, RS-1, PALB2, Nap1, p400 ATPase, EVL, NAC, MRE11, RAD50, RAD52, RAD55, RAD57, RAD54, RAD54B, Srs2, NBS1, H2AX, PARP-1, RAD18, DNA-PKcs, XRCC4, XLF, Artemis, TdT, pol μ and pol λ, ATM, AKT1, AKT2, AKT3, Nibrin, CtIP, EXO1, BLM, E4 orf6, E1b55K, homologs and derivatives thereof, Scr7, and any combination thereof. In some embodiments, said at least one exogenously added protein involved in DNA double strand break repair comprises RS-1, RAD51, or both.

[0264] In some embodiments, said at least one exogenously-added immune stimulatory agent comprises B7, CD80, CD83, CD86, CD32, CD64, 4-1BBL, anti-CD3, anti-CD3 mAb, S-2-hydroxyglutarate, anti-CD28, anti-CD28 mAb, CD1d, anti-CD2, IL-15, IL-17, IL-21, IL-2, IL-7, truncated CD19, derivative thereof, or any combination. In some embodiments, said at least one exogenously-added immune stimulatory agent comprises IL-2, IL-7, IL-15, or any combination thereof. In some embodiments, said at least one exogenously-added immune stimulatory agent is configured to stimulate expansion of at least a portion of said cell population or said cells.

[0265] In some embodiments, said primary immune cells comprises a cell selected from the group consisting of: a B cell, a basophil, a dendritic cell, an eosinophil, a gamma delta T cell, a granulocyte, a helper T cell, a Langerhans cell, a lymphoid cell, an innate lymphoid cell (ILC), a macrophage, a mast cell, a megakaryocyte, a memory T cell, a monocyte, a myeloid cell, a natural killer T cell, a neutrophil, a precursor cell, a plasma cell, a progenitor cell, a regulatory T-cell, a T cell, a thymocyte, any differentiated or de-differentiated cell thereof, or any mixture or combination of cells thereof. In some embodiments, said primary immune cells comprise primary T cells.

[0266] In some embodiments, said primary T cells are isolated from a blood sample of a subject. In some embodiments, said subject is a human. In some embodiments, said blood sample is a whole blood sample or a fractioned blood sample. In some embodiments, said blood sample comprises isolated peripheral blood mononuclear cells.

[0267] In some embodiments, said primary T cells comprise a gamma delta T cell, a helper T cell, a memory T cell, a natural killer T cell, an effector T cell, or any combination thereof.

[0268] In some embodiments, said primary immune cells comprise CD3+ cells. In some embodiments, said primary immune cells comprise tumor infiltrating lymphocytes (TILs). In some embodiments, the TILs comprise T cells, B cells, natural killer cells, macrophages, differentiated or de-differentiated cell thereof, or any combination thereof.

[0269] In some embodiments, the composition further comprises antigen-presenting cells (APCs). In some embodiments, said APCs are configured to stimulate expansion of said TILs. In some embodiments, said APCs express B7, CD80, CD83, CD86, CD32, CD64, 4-1BBL, anti-CD3, anti-CD3 mAb, S-2-hydroxyglutarate, anti-CD28, anti-CD28 mAb, CD1d, anti-CD2, membrane-bound IL-15, membrane-bound IL-17, membrane-bound IL-21, membrane-bound IL-2, truncated CD19, derivative thereof, or any combination thereof.

[0270] In some embodiments, said genetically modified cells comprise disruption of one or more genomic sites. In some embodiments, said genetically modified cells comprise a modification or deletion of one or more endogenous gene. In some embodiments, said endogenous gene comprises an immune checkpoint gene. In some embodiments, said endogenous gene comprises CISH, PD-1, or both. In some embodiments, said endogenous gene comprises CISH, PD-1, TRAC, TCRB, or a combination thereof.

[0271] In some embodiments, nuclei of said genetically modified cells comprise a transgene.

[0272] In some embodiments, said transgene codes for a protein selected from the group consisting of: a cellular receptor, an immunological checkpoint protein, a cytokine, and any combination thereof. In some embodiments, said transgene codes for a cellular receptor selected from the group consisting of: a T cell receptor (TCR), a B cell receptor (BCR), a chimeric antigen receptor (CAR), or any combination thereof. In some embodiments, said transgene codes for a T cell receptor.

[0273] In one aspect, provided herein are methods of increasing cellular viability of engineered cells comprising: introducing to a population of cells a minicircle vector or a linearized double stranded DNA construct that encodes a transgene thereby generating a population of modified cells; and contacting said population of modified cells with a DNase; wherein said contacting results in an increase in a percentage of viable cells in said population of modified cells as compared to a comparable population of modified cells to which said introducing but not said contacting is performed.

[0274] In some embodiments, the nuclei of at least a portion of said cell population comprise at least one exogenously added modulator of DNA double strand break repair. In some embodiments, the composition is substantially antibiotic-free media.

[0275] In some embodiments, said cells are primary cells. In some embodiments, said at least one exogenously-added immune stimulatory agent is present at a concentration from about 50 IU/ml to about 1000 IU/ml.

[0276] In some embodiments, said DNase is added at a concentration from about 5 μg/ml to about 15 μg/ml. In some embodiments, said DNase is selected from the group consisting of: DNase I, Benzonase, Exonuclease I, Exonuclease III, Mung Bean Nuclease, Nuclease BAL 31, RNase I, S1 Nuclease, Lambda Exonuclease, RecJ, T7 exonuclease, restriction enzymes, and any combination thereof. In some embodiments, said DNase comprises DNase I.

[0277] In some embodiments, said at least one exogenously added modulator of DNA double strand break repair comprises NAC, anti-IFNAR2 antibody, or both. In some embodiments, said at least one exogenously added modulator of DNA double strand break repair comprises a protein involved in DNA double strand break repair. In some embodiments, the protein involved in DNA double strand break repair comprises a protein selected from the group consisting of: Ku70, Ku80, BRCA1, BRCA2, RAD51, RS-1, PALB2, Nap1, p400 ATPase, EVL, NAC, MRE11, RAD50, RAD52, RAD55, RAD57, RAD54, RAD54B, Srs2, NBS1, H2AX, PARP-1, RAD18, DNA-PKcs, XRCC4, XLF, Artemis, TdT, pol μ and pol λ, ATM, AKT1, AKT2, AKT3, Nibrin, CtIP, EXO1, BLM, E4 orf6, E1b55K, homologs and derivatives thereof, Scr7, and any combination thereof. In some embodiments, said at least one exogenously added protein involved in DNA double strand break repair comprises RS-1, RAD51, or both.

[0278] In some embodiments, said at least one exogenously-added immune stimulatory agent comprises B7, CD80, CD83, CD86, CD32, CD64, 4-1BBL, anti-CD3, anti-CD3 mAb, S-2-hydroxyglutarate, anti-CD28, anti-CD28 mAb, CD1d, anti-CD2, IL-15, IL-17, IL-21, IL-2, IL-7, truncated CD19, derivative thereof, or any combination. In some embodiments, said at least one exogenously-added immune stimulatory agent comprises IL-2, IL-7, IL-15, or any combination thereof. In some embodiments, said at least one exogenously-added immune stimulatory agent is configured to stimulate expansion of at least a portion of said cell population or said cells.

[0279] In some embodiments, said primary immune cells comprises a cell selected from the group consisting of: a B cell, a basophil, a dendritic cell, an eosinophil, a gamma delta T cell, a granulocyte, a helper T cell, a Langerhans cell, a lymphoid cell, an innate lymphoid cell (ILC), a macrophage, a mast cell, a megakaryocyte, a memory T cell, a monocyte, a myeloid cell, a natural killer T cell, a neutrophil, a precursor cell, a plasma cell, a progenitor cell, a regulatory T-cell, a T cell, a thymocyte, any differentiated or de-differentiated cell thereof, or any mixture or combination of cells thereof. In some embodiments, said primary immune cells comprise primary T cells.

[0280] In some embodiments, said primary T cells are isolated from a blood sample of a subject. In some embodiments, said subject is a human. In some embodiments, said blood sample is a whole blood sample or a fractioned blood sample. In some embodiments, said blood sample comprises isolated peripheral blood mononuclear cells.

[0281] In some embodiments, said primary T cells comprise a gamma delta T cell, a helper T cell, a memory T cell, a natural killer T cell, an effector T cell, or any combination thereof.

[0282] In some embodiments, said primary immune cells comprise CD3+ cells. In some embodiments, said primary immune cells comprise tumor infiltrating lymphocytes (TILs). In some embodiments, the TILs comprise T cells, B cells, natural killer cells, macrophages, differentiated or de-differentiated cell thereof, or any combination thereof.

[0283] In some embodiments, the composition further comprises antigen-presenting cells (APCs). In some embodiments, said APCs are configured to stimulate expansion of said TILs. In some embodiments, said APCs express B7, CD80, CD83, CD86, CD32, CD64, 4-1BBL, anti-CD3, anti-CD3 mAb, S-2-hydroxyglutarate, anti-CD28, anti-CD28 mAb, CD1d, anti-CD2, membrane-bound IL-15, membrane-bound IL-17, membrane-bound IL-21, membrane-bound IL-2, truncated CD19, derivative thereof, or any combination thereof.

[0284] In some embodiments, said genetically modified cells comprise disruption of one or more genomic sites. In some embodiments, said genetically modified cells comprise a modification or deletion of one or more endogenous gene. In some embodiments, said endogenous gene comprises an immune checkpoint gene. In some embodiments, said endogenous gene comprises CISH, PD-1, or both. In some embodiments, said endogenous gene comprises CISH, PD-1, TRAC, TCRB, or a combination thereof.

[0285] In some embodiments, nuclei of said genetically modified cells comprise a transgene.

[0286] In some embodiments, said transgene codes for a protein selected from the group consisting of: a cellular receptor, an immunological checkpoint protein, a cytokine, and any combination thereof. In some embodiments, said transgene codes for a cellular receptor selected from the group consisting of: a T cell receptor (TCR), a B cell receptor (BCR), a chimeric antigen receptor (CAR), or any combination thereof. In some embodiments, said transgene codes for a T cell receptor.

[0287] In one aspect, provided herein are methods of increasing integration efficiency of engineered cells comprising: introducing to a population of cells an minicircle vector or a linearized double stranded DNA construct that encodes a transgene thereby generating a population of modified cells; and contacting said population of modified cells with a DNase; wherein said contacting results in an increase in a percentage of cells that express said transgene encoded by said minicircle vector or said linearized double stranded DNA construct as compared to a comparable population of modified cells to which said introducing but not said contacting is performed.

[0288] In some embodiments, said introducing comprises electroporating said population of cells with said exogenous polynucleic acid or said minicircle vector or said linearized double stranded DNA construct.

[0289] In some embodiments, the nuclei of at least a portion of said cell population comprise at least one exogenously added modulator of DNA double strand break repair. In some embodiments, the composition is substantially antibiotic-free media.

[0290] In some embodiments, said cells are primary cells. In some embodiments, said at least one exogenously-added immune stimulatory agent is present at a concentration from about 50 IU/ml to about 1000 IU/ml.

[0291] In some embodiments, said DNase is added at a concentration from about 5 μg/ml to about 15 μg/ml. In some embodiments, said DNase is selected from the group consisting of: DNase I, Benzonase, Exonuclease I, Exonuclease III, Mung Bean Nuclease, Nuclease BAL 31, RNase I, S1 Nuclease, Lambda Exonuclease, RecJ, T7 exonuclease, restriction enzymes, and any combination thereof. In some embodiments, said DNase comprises DNase I.

[0292] In some embodiments, said at least one exogenously added modulator of DNA double strand break repair comprises NAC, anti-IFNAR2 antibody, or both. In some embodiments, said at least one exogenously added modulator of DNA double strand break repair comprises a protein involved in DNA double strand break repair. In some embodiments, the protein involved in DNA double strand break repair comprises a protein selected from the group consisting of: Ku70, Ku80, BRCA1, BRCA2, RAD51, RS-1, PALB2, Nap1, p400 ATPase, EVL, NAC, MRE11, RAD50, RAD52, RAD55, RAD57, RAD54, RAD54B, Srs2, NBS1, H2AX, PARP-1, RAD18, DNA-PKcs, XRCC4, XLF, Artemis, TdT, pol μ and pol λ, ATM, AKT1, AKT2, AKT3, Nibrin, CtIP, EXO1, BLM, E4 orf6, E1b55K, homologs and derivatives thereof, Scr7, and any combination thereof. In some embodiments, said at least one exogenously added protein involved in DNA double strand break repair comprises RS-1, RAD51, or both.

[0293] In some embodiments, said at least one exogenously-added immune stimulatory agent comprises B7, CD80, CD83, CD86, CD32, CD64, 4-1BBL, anti-CD3, anti-CD3 mAb, S-2-hydroxyglutarate, anti-CD28, anti-CD28 mAb, CD1d, anti-CD2, IL-15, IL-17, IL-21, IL-2, IL-7, truncated CD19, derivative thereof, or any combination. In some embodiments, said at least one exogenously-added immune stimulatory agent comprises IL-2, IL-7, IL-15, or any combination thereof. In some embodiments, said at least one exogenously-added immune stimulatory agent is configured to stimulate expansion of at least a portion of said cell population or said cells.

[0294] In some embodiments, said primary immune cells comprises a cell selected from the group consisting of a B cell, a basophil, a dendritic cell, an eosinophil, a gamma delta T cell, a granulocyte, a helper T cell, a Langerhans cell, a lymphoid cell, an innate lymphoid cell (ILC), a macrophage, a mast cell, a megakaryocyte, a memory T cell, a monocyte, a myeloid cell, a natural killer T cell, a neutrophil, a precursor cell, a plasma cell, a progenitor cell, a regulatory T-cell, a T cell, a thymocyte, any differentiated or de-differentiated cell thereof, or any mixture or combination of cells thereof. In some embodiments, said primary immune cells comprise primary T cells.

[0295] In some embodiments, said primary T cells are isolated from a blood sample of a subject. In some embodiments, said subject is a human. In some embodiments, said blood sample is a whole blood sample or a fractioned blood sample. In some embodiments, said blood sample comprises isolated peripheral blood mononuclear cells.

[0296] In some embodiments, said primary T cells comprise a gamma delta T cell, a helper T cell, a memory T cell, a natural killer T cell, an effector T cell, or any combination thereof.

[0297] In some embodiments, said primary immune cells comprise CD3+ cells. In some embodiments, said primary immune cells comprise tumor infiltrating lymphocytes (TILs). In some embodiments, the TILs comprise T cells, B cells, natural killer cells, macrophages, differentiated or de-differentiated cell thereof, or any combination thereof.

[0298] In some embodiments, the composition further comprises antigen-presenting cells (APCs). In some embodiments, said APCs are configured to stimulate expansion of said TILs. In some embodiments, said APCs express B7, CD80, CD83, CD86, CD32, CD64, 4-1BBL, anti-CD3, anti-CD3 mAb, S-2-hydroxyglutarate, anti-CD28, anti-CD28 mAb, CD1d, anti-CD2, membrane-bound IL-15, membrane-bound IL-17, membrane-bound IL-21, membrane-bound IL-2, truncated CD19, derivative thereof, or any combination thereof.

[0299] In some embodiments, said genetically modified cells comprise disruption of one or more genomic sites. In some embodiments, said genetically modified cells comprise a modification or deletion of one or more endogenous gene. In some embodiments, said endogenous gene comprises an immune checkpoint gene. In some embodiments, said endogenous gene comprises CISH, PD-1, or both. In some embodiments, said endogenous gene comprises CISH, PD-1, TRAC, TCRB, or a combination thereof.

[0300] In some embodiments, nuclei of said genetically modified cells comprise a transgene.

[0301] In some embodiments, said transgene codes for a protein selected from the group consisting of: a cellular receptor, an immunological checkpoint protein, a cytokine, and any combination thereof. In some embodiments, said transgene codes for a cellular receptor selected from the group consisting of: a T cell receptor (TCR), a B cell receptor (BCR), a chimeric antigen receptor (CAR), or any combination thereof. In some embodiments, said transgene codes for a T cell receptor.

[0302] In one aspect, provided herein are methods of genomically editing a population of primary cells comprising: introducing to said population of primary cells an exogenous polynucleic acid that encodes a transgene into a double strand break thereby generating a population of modified primary cells; and introducing into said population of modified primary cells a modulator of DNA double strand break repair; wherein said contacting increases at least one of: a percent of viability; or a percent of expression of said transgene encoded by said exogenous polynucleic acid; in said population of modified primary cells as compared to a comparable population of modified primary cells to which said introducing but not said contacting is performed. In some embodiments, said cell population comprises primary immune cells.

[0303] In some embodiments, the nuclei of at least a portion of said cell population comprise at least one exogenously added modulator of DNA double strand break repair. In some embodiments, the composition is substantially antibiotic-free media.

[0304] In some embodiments, said cells are primary cells. In some embodiments, said at least one exogenously-added immune stimulatory agent is present at a concentration from about 50 IU/ml to about 1000 IU/ml.

[0305] In some embodiments, said DNase is added at a concentration from about 5 μg/ml to about 15 μg/ml. In some embodiments, said DNase is selected from the group consisting of: DNase I, Benzonase, Exonuclease I, Exonuclease III, Mung Bean Nuclease, Nuclease BAL 31, RNase I, S1 Nuclease, Lambda Exonuclease, RecJ, T7 exonuclease, restriction enzymes, and any combination thereof. In some embodiments, said DNase comprises DNase I.

[0306] In some embodiments, said at least one exogenously added modulator of DNA double strand break repair comprises NAC, anti-IFNAR2 antibody, or both. In some embodiments, said at least one exogenously added modulator of DNA double strand break repair comprises a protein involved in DNA double strand break repair. In some embodiments, the protein involved in DNA double strand break repair comprises a protein selected from the group consisting of: Ku70, Ku80, BRCA1, BRCA2, RAD51, RS-1, PALB2, Nap1, p400 ATPase, EVL, NAC, MRE11, RAD50, RAD52, RAD55, RAD57, RAD54, RAD54B, Srs2, NBS1, H2AX, PARP-1, RAD18, DNA-PKcs, XRCC4, XLF, Artemis, TdT, pol μ and pol λ, ATM, AKT1, AKT2, AKT3, Nibrin, CtIP, EXO1, BLM, E4 orf6, E1b55K, homologs and derivatives thereof, Scr7, and any combination thereof. In some embodiments, said at least one exogenously added protein involved in DNA double strand break repair comprises RS-1, RAD51, or both.

[0307] In some embodiments, said at least one exogenously-added immune stimulatory agent comprises B7, CD80, CD83, CD86, CD32, CD64, 4-1BBL, anti-CD3, anti-CD3 mAb, S-2-hydroxyglutarate, anti-CD28, anti-CD28 mAb, CD1d, anti-CD2, IL-15, IL-17, IL-21, IL-2, IL-7, truncated CD19, derivative thereof, or any combination. In some embodiments, said at least one exogenously-added immune stimulatory agent comprises IL-2, IL-7, IL-15, or any combination thereof. In some embodiments, said at least one exogenously-added immune stimulatory agent is configured to stimulate expansion of at least a portion of said cell population or said cells.

[0308] In some embodiments, said primary immune cells comprises a cell selected from the group consisting of: a B cell, a basophil, a dendritic cell, an eosinophil, a gamma delta T cell, a granulocyte, a helper T cell, a Langerhans cell, a lymphoid cell, an innate lymphoid cell (ILC), a macrophage, a mast cell, a megakaryocyte, a memory T cell, a monocyte, a myeloid cell, a natural killer T cell, a neutrophil, a precursor cell, a plasma cell, a progenitor cell, a regulatory T-cell, a T cell, a thymocyte, any differentiated or de-differentiated cell thereof, or any mixture or combination of cells thereof. In some embodiments, said primary immune cells comprise primary T cells.

[0309] In some embodiments, said primary T cells are isolated from a blood sample of a subject. In some embodiments, said subject is a human. In some embodiments, said blood sample is a whole blood sample or a fractioned blood sample. In some embodiments, said blood sample comprises isolated peripheral blood mononuclear cells.

[0310] In some embodiments, said primary T cells comprise a gamma delta T cell, a helper T cell, a memory T cell, a natural killer T cell, an effector T cell, or any combination thereof.

[0311] In some embodiments, said primary immune cells comprise CD3+ cells. In some embodiments, said primary immune cells comprise tumor infiltrating lymphocytes (TILs). In some embodiments, the TILs comprise T cells, B cells, natural killer cells, macrophages, differentiated or de-differentiated cell thereof, or any combination thereof.

[0312] In some embodiments, the composition further comprises antigen-presenting cells (APCs). In some embodiments, said APCs are configured to stimulate expansion of said TILs. In some embodiments, said APCs express B7, CD80, CD83, CD86, CD32, CD64, 4-1BBL, anti-CD3, anti-CD3 mAb, S-2-hydroxyglutarate, anti-CD28, anti-CD28 mAb, CD1d, anti-CD2, membrane-bound IL-15, membrane-bound IL-17, membrane-bound IL-21, membrane-bound IL-2, truncated CD19, derivative thereof, or any combination thereof.

[0313] In some embodiments, said genetically modified cells comprise disruption of one or more genomic sites. In some embodiments, said genetically modified cells comprise a modification or deletion of one or more endogenous gene. In some embodiments, said endogenous gene comprises an immune checkpoint gene. In some embodiments, said endogenous gene comprises CISH, PD-1, TRAC, TCRB, or a combination thereof.

[0314] In some embodiments, nuclei of said genetically modified cells comprise a transgene.

[0315] In some embodiments, said transgene codes for a protein selected from the group consisting of: a cellular receptor, an immunological checkpoint protein, a cytokine, and any combination thereof. In some embodiments, said transgene codes for a cellular receptor selected from the group consisting of: a T cell receptor (TCR), a B cell receptor (BCR), a chimeric antigen receptor (CAR), or any combination thereof. In some embodiments, said transgene codes for a T cell receptor.

[0316] In one aspect, provided herein are methods of genomically editing a population of primary immune cells comprising: electroporating said population of primary immune cells to introduce: a guide polynucleic acid; a guided nuclease; and a minicircle vector or a linearized double stranded DNA construct that encodes a transgene thereby generating a population of modified primary immune cells; contacting said population of modified primary immune cells with a DNase and an immune stimulatory agent; wherein said contacting results in an increase in a percentage of viable cells that express said transgene in said population of modified primary immune cells as compared to a comparable population of modified primary immune cells to which said electroporating but not said contacting is performed.

[0317] In some embodiments, said electroporating comprises contacting said cells with a polynucleic acid that codes for said guided-nuclease. In some embodiments, said polynucleic acid comprises DNA. In some embodiments, said polynucleic acid comprises mRNA. In some embodiments, said electroporating comprises contacting said cells with said guided-nuclease. In some embodiments, said guided-nuclease comprises Cas proteins, Zinc finger nuclease, TALEN, meganucleases, homologues thereof, or modified versions thereof, or any combination thereof.

[0318] In some embodiments, said guided-nuclease comprises a Cas protein.

[0319] A Cas protein can be from any suitable organism. Non-limiting examples include Streptococcus pyogenes, Streptococcus thermophilus, Streptococcus sp., Staphylococcus aureus, Nocardiopsis dassonvillei, Streptomyces pristinae spiralis, Streptomyces viridochromo genes, Streptomyces viridochromogenes, Streptosporangium roseum, Streptosporangium roseum, Alicyclobacillus acidocaldarius, Bacillus pseudomycoides, Bacillus selenitireducens, Exiguobacterium sibiricum, Lactobacillus delbrueckii, Lactobacillus salivarius, Microscilla marina, Burkholderiales bacterium, Polaromonas naphthalenivorans, Polaromonas sp., Crocosphaera watsonii, Cyanothece sp., Microcystis aeruginosa, Pseudomonas aeruginosa, Synechococcus sp., Acetohalobium arabaticum, Ammonifex degensii, Caldicelulosiruptor becscii, Candidatus Desulforudis, Clostridium botulinum, Clostridium difficile, Finegoldia magna, Natranaerobius thermophilus, Pelotomaculum thermopropionicum, Acidithiobacillus caldus, Acidithiobacillus ferrooxidans, Allochromatium vinosum, Marinobacter sp., Nitrosococcus halophilus, Nitrosococcus watsoni, Pseudoalteromonas haloplanktis, Ktedonobacter racemifer, Methanohalobium evestigatum, Anabaena variabilis, Nodularia spumigena, Nostoc sp., Arthrospira maxima, Arthrospira platensis, Arthrospira sp., Lyngbya sp., Microcoleus chthonoplastes, Oscillatoria sp., Petrotoga mobilis, Thermosipho africanus, Acaryochloris marina, Leptotrichia shahii, and Francisella novicida. In some aspects, the organism is Streptococcus pyogenes (S. pyogenes). In some aspects, the organism is Staphylococcus aureus (S. aureus). In some aspects, the organism is Streptococcus thermophilus (S. thermophilus).

[0320] A Cas protein can be derived from a variety of bacterial species including, but not limited to, Veillonella atypical, Fusobacterium nucleatum, Filifactor alocis, Solobacterium moorei, Coprococcus catus, Treponema denticola, Peptoniphilus duerdenii, Catenibacterium mitsuokai, Streptococcus mutans, Listeria innocua, Staphylococcus pseudintermedius, Acidaminococcus intestine, Olsenella uli, Oenococcus kitaharae, Bifidobacterium bifidum, Lactobacillus rhamnosus, Lactobacillus gasseri, Finegoldia magna, Mycoplasma mobile, Mycoplasma gallisepticum, Mycoplasma ovipneumoniae, Mycoplasma canis, Mycoplasma synoviae, Eubacterium rectale, Streptococcus thermophilus, Eubacterium dolichum, Lactobacillus coryniformis subsp. Torquens, Ilyobacter polytropus, Ruminococcus albus, Akkermansia muciniphila, Acidothermus cellulolyticus, Bifidobacterium longum, Bifidobacterium dentium, Corynebacterium diphtheria, Elusimicrobium minutum, Nitratifractor salsuginis, Sphaerochaeta globus, Fibrobacter succinogenes subsp. Succinogenes, Bacteroides fragilis, Capnocytophaga ochracea, Rhodopseudomonas palustris, Prevotella micans, Prevotella ruminicola, Flavobacterium columnare, Aminomonas paucivorans, Rhodospirillum rubrum, Candidatus Puniceispirillum marinum, Verminephrobacter eiseniae, Ralstonia syzygii, Dinoroseobacter shibae, Azospirillum, Nitrobacter hamburgensis, Bradyrhizobium, Wolinella succinogenes, Campylobacter jejuni subsp. Jejuni, Helicobacter mustelae, Bacillus cereus, Acidovorax ebreus, Clostridium perfringens, Parvibaculum lavamentivorans, Roseburia intestinalis, Neisseria meningitidis, Pasteurella multocida subsp. Multocida, Sutterella wadsworthensis, proteobacterium, Legionella pneumophila, Parasutterella excrementihominis, Wolinella succinogenes, and Francisella novicida.

[0321] A Cas protein as used herein can be a wildtype or a modified form of a Cas protein. A Cas protein can be an active variant, inactive variant, or fragment of a wild type or modified Cas protein. A Cas protein can comprise an amino acid change such as a deletion, insertion, substitution, variant, mutation, fusion, chimera, or any combination thereof relative to a wild-type version of the Cas protein. A Cas protein can be a polypeptide with at least about 5%, 10%, 20%, 30%, 40%, 50%, 60%, 70%, 80%, 90%, 91%, 92%, 93%, 94%, 95%, 96%, 97%, 98%, 99%, or 100% sequence identity or sequence similarity to a wild type exemplary Cas protein. A Cas protein can be a polypeptide with at most about 5%, 10%, 20%, 30%, 40%, 50%, 60%, 70%, 80%, 90%, 100% sequence identity and/or sequence similarity to a wild type exemplary Cas protein. Variants or fragments can comprise at least about 5%, 10%, 20%, 30%, 40%, 50%, 60%, 70%, 80%, 90%9, 91%, 92%, 93%, 94%, 95%, 96%, 97%, 98%, 99%, or 100% sequence identity or sequence similarity to a wild type or modified Cas protein or a portion thereof. Variants or fragments can be targeted to a nucleic acid locus in complex with a guide nucleic acid while lacking nucleic acid cleavage activity.

[0322] In some embodiments, said Cas protein comprises Cas1, Cas1B, Cas2, Cas3, Cas4, Cas5, Cas6, Cas7, Cas8, Cas9, Cas10, Csy1, Csy2, Csy3, Cse1, Cse2, Csc1, Csc2, Csa5, Csn2, Csm2, Csm3, Csm4, Csm5, Csm6, Cmr1, Cmr3, Cmr4, Cmr5, Cmr6, Csb1, Csb2, Csb3, Csx17, Csx14, Csx10, Csx16, CsaX, Csx3, Csx1, Csx1S, Csf1, Csf2, CsO, Csf4, Cpf1, c2c1, c2c3, Cas9HiFi, homologues thereof, or modified versions thereof.

[0323] In some embodiments, said guide polynucleic acid comprises DNA that codes for a guide RNA. In some embodiments, said guide polynucleic acid comprises a guide RNA.

[0324] In some embodiments, said electroporating comprise contacting said population primary human cells with a guided-ribonucleoprotein complex that comprises said guide polynucleic acid and said guided-nuclease.

[0325] In some embodiments, said guide RNA comprises a CRISPR RNA (crRNA) and a transactivating crRNA (tracrRNA).

[0326] In some embodiments, said DNase is present at a concentration from about 5 μg/ml to about 15 μg/ml.

[0327] In some embodiments, said DNase is selected from the group consisting of: DNase I, Benzonase, Exonuclease I, Exonuclease III, Mung Bean Nuclease, Nuclease BAL 31, RNase I, S1 Nuclease, Lambda Exonuclease, RecJ, T7 exonuclease, restriction enzymes, and any combination thereof. In some embodiments, said DNase comprises DNase I.

[0328] In some embodiments, said contacting further comprises contacting said population of modified primary cells with an immune stimulatory agent. In some embodiments, said contacting with said immune stimulatory agent increases at least one of: a percent of viability; or a percent of expression of said transgene encoded by said exogenous polynucleic acid; in said population of modified primary cells as compared to a comparable population of modified primary cells to which said introducing but not said contacting is performed. In some embodiments, said immune stimulatory agent comprises B7, CD80, CD83, CD86, CD32, CD64, 4-1BBL, anti-CD3, anti-CD3 mAb, S-2-hydroxyglutarate, anti-CD28, anti-CD28 mAb, CD1d, anti-CD2, IL-15, IL-17, IL-21, IL-2, IL-7, truncated CD19, derivative thereof, or any combination. In some embodiments, said immune stimulatory agent comprises IL-2, IL-7, IL-15, or any combination thereof. In some embodiments, said immune stimulatory agent is present at a concentration from about 50 IU/ml to about 1000 IU/ml. In some embodiments, said immune stimulatory agent is configured to stimulate expansion of at least a portion of said cell population or said cells. In some embodiments, said contacting further comprises introducing into said population of modified cells a modulator of DNA double strand break repair.

[0329] In some embodiments, said introducing said modulator of DNA double strand break repair increases at least one of: a percent of viability; or a percent of expression of said transgene encoded by said exogenous polynucleic acid; in said population of modified primary cells as compared to a comparable population of modified primary cells to which said introducing but not said contacting is performed. In some embodiments, said modulator of DNA double strand break repair comprises NAC, anti-IFNAR2 antibody, or both. In some embodiments, said modulator of DNA double strand break repair comprises a protein involved in DNA double strand repair. In some embodiments, said protein involved in DNA double strand break repair comprises a protein selected from the group consisting of: Ku70, Ku80, BRCA1, BRCA2, RAD51, RS-1, PALB2, Nap1, p400 ATPase, EVL, NAC, MRE11, RAD50, RAD52, RAD55, RAD57, RAD54, RAD54B, Srs2, NBS1, H2AX, PARP-1, RAD18, DNA-PKcs, XRCC4, XLF, Artemis, TdT, pol μ and pol λ, ATM, AKT1, AKT2, AKT3, Nibrin, CtIP, EXO1, BLM, E4 orf6, E1b55K, homologs and derivatives thereof, Scr7, and any combination thereof. In some embodiments, said protein involved in DNA comprises RS-1, RAD51, or both.

[0330] In some embodiments, said contacting comprising contacting said population of modified primary cells in a substantially antibiotics-free media. In some embodiments, said primary immune cells comprises a cell selected from the group consisting of: a B cell, a basophil, a dendritic cell, an eosinophil, a gamma delta T cell, a granulocyte, a helper T cell, a Langerhans cell, a lymphoid cell, an innate lymphoid cell (ILC), a macrophage, a mast cell, a megakaryocyte, a memory T cell, a monocyte, a myeloid cell, a natural killer T cell, a neutrophil, a precursor cell, a plasma cell, a progenitor cell, a regulatory T-cell, a T cell, a thymocyte, any differentiated or de-differentiated cell thereof, or any mixture or combination of cells thereof. In some embodiments, said primary immune cells comprise primary T cells. In some embodiments, said primary T cells are isolated from a blood sample of a subject. In some embodiments, said subject is a human. In some embodiments, said blood sample is a whole blood sample or a fractioned blood sample. In some embodiments, said blood sample comprises isolated peripheral blood mononuclear cells. In some embodiments, said primary T cells comprise a gamma delta T cell, a helper T cell, a memory T cell, a natural killer T cell, an effector T cell, or any combination thereof. In some embodiments, said primary immune cells comprise CD3+ cells. In some embodiments, said primary immune cells comprise tumor infiltrating lymphocytes (TILs). In some embodiments, the TILs comprise T cells, B cells, natural killer cells, macrophages, differentiated or de-differentiated cell thereof, or any combination thereof.

[0331] In some embodiments, said contacting comprises contacting said TILs at the presence of co-cultured APCs. In some embodiments, said APCs are configured to stimulate expansion of said TILs. In some embodiments, said APCs express B7, CD80, CD83, CD86, CD32, CD64, 4-1BBL, anti-CD3, anti-CD3 mAb, S-2-hydroxyglutarate, anti-CD28, anti-CD28 mAb, CD1d, anti-CD2, membrane-bound IL-15, membrane-bound IL-17, membrane-bound IL-21, membrane-bound IL-2, truncated CD19, derivative thereof, or any combination thereof. In some embodiments, said introducing comprises disrupting one or more genomic sites of at least a portion of said population of primary cells, resulting in said population of modified primary cells.

[0332] In some embodiments, said transgene codes for a protein selected from the group consisting of: a cellular receptor, an immunological checkpoint protein, a cytokine, and any combination thereof. In some embodiments, said transgene codes for a T cell receptor.

[0333] In some embodiments, said introducing comprises modifying or deleting one or more endogenous gene of at least a portion of said population of primary cells, resulting in said population of modified primary cells. In some embodiments, said endogenous gene comprise an immune checkpoint gene. In some embodiments, said endogenous gene comprises PD-1.

[0334] In one aspect, provided herein are methods of genomically editing a population of primary immune cells comprising: a) electroporating said population of primary human cells to introduce: a guide polynucleic acid; a guided-nuclease; and a minicircle vector or a linearized double stranded DNA construct that encodes a transgene thereby generating a population of modified primary immune cells; and contacting said population of modified primary immune cells with a DNase and an immune stimulatory agent; wherein said contacting results in an increase in a percentage of cells that express said transgene encoded by said minicircle vector or said linearized double stranded DNA construct as compared to a comparable population of modified primary immune cells to which said electroporating but not said contacting is performed.

[0335] In some embodiments, said electroporating comprises contacting said cells with a polynucleic acid that codes for said guided-nuclease. In some embodiments, said polynucleic acid comprises DNA. In some embodiments, said polynucleic acid comprises mRNA. In some embodiments, said electroporating comprises contacting said cells with said guided-nuclease. In some embodiments, said guided-nuclease comprises Cas proteins, Zinc finger nuclease, TALEN, meganucleases, homologues thereof, or modified versions thereof, or any combination thereof.

[0336] In some embodiments, said guided-nuclease comprises a Cas protein. In some embodiments, said Cas protein comprises Cas1, Cas1B, Cas2, Cas3, Cas4, Cas5, Cas6, Cas7, Cas8, Cas9, Cas10, Csy1, Csy2, Csy3, Cse1, Cse2, Csc1, Csc2, Csa5, Csn2, Csm2, Csm3, Csm4, Csm5, Csm6, Cmr1, Cmr3, Cmr4, Cmr5, Cmr6, Csb1, Csb2, Csb3, Csx17, Csx14, Csx10, Csx16, CsaX, Csx3, Csx1, Csx1S, Csf1, Csf2, CsO, Csf4, Cpf1, c2c1, c2c3, Cas9HiFi, homologues thereof, or modified versions thereof.

[0337] In some embodiments, said guide polynucleic acid comprises DNA that codes for a guide RNA. In some embodiments, said guide polynucleic acid comprises a guide RNA.

[0338] In some embodiments, said electroporating comprise contacting said population primary human cells with a guided-ribonucleoprotein complex that comprises said guide polynucleic acid and said guided-nuclease.

[0339] In some embodiments, said guide RNA comprises a CRISPR RNA (crRNA) and a transactivating crRNA (tracrRNA).

[0340] In some embodiments, said DNase is present at a concentration from about 5 μg/ml to about 15 μg/ml.

[0341] In some embodiments, said DNase is selected from the group consisting of: DNase I, Benzonase, Exonuclease I, Exonuclease III, Mung Bean Nuclease, Nuclease BAL 31, RNase I, S1 Nuclease, Lambda Exonuclease, RecJ, T7 exonuclease, restriction enzymes, and any combination thereof. In some embodiments, said DNase comprises DNase I.

[0342] In some embodiments, said contacting further comprises contacting said population of modified primary cells with an immune stimulatory agent. In some embodiments, said contacting with said immune stimulatory agent increases at least one of: a percent of viability; or a percent of expression of said transgene encoded by said exogenous polynucleic acid; in said population of modified primary cells as compared to a comparable population of modified primary cells to which said introducing but not said contacting is performed. In some embodiments, said immune stimulatory agent comprises B7, CD80, CD83, CD86, CD32, CD64, 4-1BBL, anti-CD3, anti-CD3 mAb, S-2-hydroxyglutarate, anti-CD28, anti-CD28 mAb, CD1d, anti-CD2, IL-15, IL-17, IL-21, IL-2, IL-7, truncated CD19, derivative thereof, or any combination. In some embodiments, said immune stimulatory agent comprises IL-2, IL-7, IL-15, or any combination thereof. In some embodiments, said immune stimulatory agent is present at a concentration from about 50 IU/ml to about 1000 IU/ml. In some embodiments, said immune stimulatory agent is configured to stimulate expansion of at least a portion of said cell population or said cells. In some embodiments, said contacting further comprises introducing into said population of modified cells a modulator of DNA double strand break repair.

[0343] In some embodiments, said introducing said modulator of DNA double strand break repair increases at least one of: a percent of viability; or a percent of expression of said transgene encoded by said exogenous polynucleic acid; in said population of modified primary cells as compared to a comparable population of modified primary cells to which said introducing but not said contacting is performed. In some embodiments, said modulator of DNA double strand break repair comprises NAC, anti-IFNAR2 antibody, or both. In some embodiments, said modulator of DNA double strand break repair comprises a protein involved in DNA double strand repair. In some embodiments, said protein involved in DNA double strand break repair comprises a protein selected from the group consisting of: Ku70, Ku80, BRCA1, BRCA2, RAD51, RS-1, PALB2, Nap1, p400 ATPase, EVL, NAC, MRE11, RAD50, RAD52, RAD55, RAD57, RAD54, RAD54B, Srs2, NBS1, H2AX, PARP-1, RAD18, DNA-PKcs, XRCC4, XLF, Artemis, TdT, pol μ and pol λ, ATM, AKT1, AKT2, AKT3, Nibrin, CtIP, EXO1, BLM, E4 orf6, E1b55K, homologs and derivatives thereof, Scr7, and any combination thereof. In some embodiments, said protein involved in DNA comprises RS-1, RAD51, or both.

[0344] In some embodiments, said contacting comprising contacting said population of modified primary cells in a substantially antibiotics-free media. In some embodiments, said primary immune cells comprises a cell selected from the group consisting of: a B cell, a basophil, a dendritic cell, an eosinophil, a gamma delta T cell, a granulocyte, a helper T cell, a Langerhans cell, a lymphoid cell, an innate lymphoid cell (ILC), a macrophage, a mast cell, a megakaryocyte, a memory T cell, a monocyte, a myeloid cell, a natural killer T cell, a neutrophil, a precursor cell, a plasma cell, a progenitor cell, a regulatory T-cell, a T cell, a thymocyte, any differentiated or de-differentiated cell thereof, or any mixture or combination of cells thereof. In some embodiments, said primary immune cells comprise primary T cells. In some embodiments, said primary T cells are isolated from a blood sample of a subject. In some embodiments, said subject is a human. In some embodiments, said blood sample is a whole blood sample or a fractioned blood sample. In some embodiments, said blood sample comprises isolated peripheral blood mononuclear cells. In some embodiments, said primary T cells comprise a gamma delta T cell, a helper T cell, a memory T cell, a natural killer T cell, an effector T cell, or any combination thereof. In some embodiments, said primary immune cells comprise CD3+ cells. In some embodiments, said primary immune cells comprise tumor infiltrating lymphocytes (TILs). In some embodiments, the TILs comprise T cells, B cells, natural killer cells, macrophages, differentiated or de-differentiated cell thereof, or any combination thereof.

[0345] In some embodiments, said contacting comprises contacting said TILs at the presence of co-cultured APCs. In some embodiments, said APCs are configured to stimulate expansion of said TILs. In some embodiments, said APCs express B7, CD80, CD83, CD86, CD32, CD64, 4-1BBL, anti-CD3, anti-CD3 mAb, S-2-hydroxyglutarate, anti-CD28, anti-CD28 mAb, CD1d, anti-CD2, membrane-bound IL-15, membrane-bound IL-17, membrane-bound IL-21, membrane-bound IL-2, truncated CD19, derivative thereof, or any combination thereof. In some embodiments, said introducing comprises disrupting one or more genomic sites of at least a portion of said population of primary cells, resulting in said population of modified primary cells.

[0346] In some embodiments, said transgene codes for a protein selected from the group consisting of: a cellular receptor, an immunological checkpoint protein, a cytokine, and any combination thereof. In some embodiments, said transgene codes for a T cell receptor.

[0347] In some embodiments, said introducing comprises modifying or deleting one or more endogenous gene of at least a portion of said population of primary cells, resulting in said population of modified primary cells. In some embodiments, said endogenous gene comprise an immune checkpoint gene. In some embodiments, said endogenous gene comprises PD-1.

[0348] In one aspect, provided herein are methods of electroporating cells comprising: a first electroporation step to introduce a guided-nuclease to said cells; and a second electroporation step comprising introducing: a guide polynucleic acid comprising a region complementary to at least a portion of a gene; and an exogenous polynucleic acid comprising a cellular receptor sequence thereby generating modified cells; wherein said modified cells have at least one of: an increase in a percentage of integration of said exogenous polynucleic acid comprising a cellular receptor sequence; or an increase in a percentage of viability as compared to comparable cells comprising a single electroporation consisting of a) and b).

[0349] In some embodiments, said first electroporation step comprises contacting said cells with a polynucleic acid that codes for said guided-nuclease. In some embodiments, said polynucleic acid comprises DNA. In some embodiments, said polynucleic acid comprises mRNA. In some embodiments, said first electroporation step comprises contacting said cells with said guided-nuclease.

[0350] In some embodiments, said electroporating comprises contacting said cells with a polynucleic acid that codes for said guided-nuclease. In some embodiments, said polynucleic acid comprises DNA. In some embodiments, said polynucleic acid comprises mRNA. In some embodiments, said electroporating comprises contacting said cells with said guided-nuclease. In some embodiments, said guided-nuclease comprises Cas proteins, Zinc finger nuclease, TALEN, meganucleases, homologues thereof, or modified versions thereof, or any combination thereof.

[0351] In some embodiments, said guided-nuclease comprises a Cas protein. In some embodiments, said Cas protein comprises Cas1, Cas1B, Cas2, Cas3, Cas4, Cas5, Cas6, Cas7, Cas8, Cas9, Cas10, Csy1, Csy2, Csy3, Cse1, Cse2, Csc1, Csc2, Csa5, Csn2, Csm2, Csm3, Csm4, Csm5, Csm6, Cmr1, Cmr3, Cmr4, Cmr5, Cmr6, Csb1, Csb2, Csb3, Csx17, Csx14, Csx10, Csx16, CsaX, Csx3, Csx1, Csx1S, Csf1, Csf2, CsO, Csf4, Cpf1, c2c1, c2c3, Cas9HiFi, homologues thereof, or modified versions thereof.

[0352] In some embodiments, said guide polynucleic acid comprises DNA that codes for a guide RNA. In some embodiments, said guide polynucleic acid comprises a guide RNA.

[0353] In some embodiments, said electroporating comprise contacting said population primary human cells with a guided-ribonucleoprotein complex that comprises said guide polynucleic acid and said guided-nuclease.

[0354] In some embodiments, said guide RNA comprises a CRISPR RNA (crRNA) and a transactivating crRNA (tracrRNA).

[0355] In some embodiments, said DNase is present at a concentration from about 5 μg/ml to about 15 μg/ml.

[0356] In some embodiments, said DNase is selected from the group consisting of: DNase I, Benzonase, Exonuclease I, Exonuclease III, Mung Bean Nuclease, Nuclease BAL 31, RNase I, S1 Nuclease, Lambda Exonuclease, RecJ, T7 exonuclease, restriction enzymes, and any combination thereof. In some embodiments, said DNase comprises DNase I.

[0357] In some embodiments, said contacting further comprises contacting said population of modified primary cells with an immune stimulatory agent. In some embodiments, said contacting with said immune stimulatory agent increases at least one of: a percent of viability; or a percent of expression of said transgene encoded by said exogenous polynucleic acid; in said population of modified primary cells as compared to a comparable population of modified primary cells to which said introducing but not said contacting is performed. In some embodiments, said immune stimulatory agent comprises B7, CD80, CD83, CD86, CD32, CD64, 4-1BBL, anti-CD3, anti-CD3 mAb, S-2-hydroxyglutarate, anti-CD28, anti-CD28 mAb, CD1d, anti-CD2, IL-15, IL-17, IL-21, IL-2, IL-7, truncated CD19, derivative thereof, or any combination. In some embodiments, said immune stimulatory agent comprises IL-2, IL-7, IL-15, or any combination thereof. In some embodiments, said immune stimulatory agent is present at a concentration from about 50 IU/ml to about 1000 IU/ml. In some embodiments, said immune stimulatory agent is configured to stimulate expansion of at least a portion of said cell population or said cells. In some embodiments, said contacting further comprises introducing into said population of modified cells a modulator of DNA double strand break repair.

[0358] In some embodiments, said introducing said modulator of DNA double strand break repair increases at least one of: a percent of viability; or a percent of expression of said transgene encoded by said exogenous polynucleic acid; in said population of modified primary cells as compared to a comparable population of modified primary cells to which said introducing but not said contacting is performed. In some embodiments, said modulator of DNA double strand break repair comprises NAC, anti-IFNAR2 antibody, or both. In some embodiments, said modulator of DNA double strand break repair comprises a protein involved in DNA double strand repair. In some embodiments, said protein involved in DNA double strand break repair comprises a protein selected from the group consisting of: Ku70, Ku80, BRCA1, BRCA2, RAD51, RS-1, PALB2, Nap1, p400 ATPase, EVL, NAC, MRE11, RAD50, RAD52, RAD55, RAD57, RAD54, RAD54B, Srs2, NBS1, H2AX, PARP-1, RAD18, DNA-PKcs, XRCC4, XLF, Artemis, TdT, pol μ and pol λ, ATM, AKT1, AKT2, AKT3, Nibrin, CtIP, EXO1, BLM, E4 orf6, E1b55K, homologs and derivatives thereof, Scr7, and any combination thereof. In some embodiments, said protein involved in DNA comprises RS-1, RAD51, or both.

[0359] In some embodiments, said contacting comprising contacting said population of modified primary cells in a substantially antibiotics-free media. In some embodiments, said primary immune cells comprises a cell selected from the group consisting of: a B cell, a basophil, a dendritic cell, an eosinophil, a gamma delta T cell, a granulocyte, a helper T cell, a Langerhans cell, a lymphoid cell, an innate lymphoid cell (ILC), a macrophage, a mast cell, a megakaryocyte, a memory T cell, a monocyte, a myeloid cell, a natural killer T cell, a neutrophil, a precursor cell, a plasma cell, a progenitor cell, a regulatory T-cell, a T cell, a thymocyte, any differentiated or de-differentiated cell thereof, or any mixture or combination of cells thereof. In some embodiments, said primary immune cells comprise primary T cells. In some embodiments, said primary T cells are isolated from a blood sample of a subject. In some embodiments, said subject is a human. In some embodiments, said blood sample is a whole blood sample or a fractioned blood sample. In some embodiments, said blood sample comprises isolated peripheral blood mononuclear cells. In some embodiments, said primary T cells comprise a gamma delta T cell, a helper T cell, a memory T cell, a natural killer T cell, an effector T cell, or any combination thereof. In some embodiments, said primary immune cells comprise CD3+ cells. In some embodiments, said primary immune cells comprise tumor infiltrating lymphocytes (TILs). In some embodiments, the TILs comprise T cells, B cells, natural killer cells, macrophages, differentiated or de-differentiated cell thereof, or any combination thereof.

[0360] In some embodiments, said contacting comprises contacting said TILs at the presence of co-cultured APCs. In some embodiments, said APCs are configured to stimulate expansion of said TILs. In some embodiments, said APCs express B7, CD80, CD83, CD86, CD32, CD64, 4-1BBL, anti-CD3, anti-CD3 mAb, S-2-hydroxyglutarate, anti-CD28, anti-CD28 mAb, CD1d, anti-CD2, membrane-bound IL-15, membrane-bound IL-17, membrane-bound IL-21, membrane-bound IL-2, truncated CD19, derivative thereof, or any combination thereof. In some embodiments, said introducing comprises disrupting one or more genomic sites of at least a portion of said population of primary cells, resulting in said population of modified primary cells.

[0361] In some embodiments, said transgene codes for a protein selected from the group consisting of: a cellular receptor, an immunological checkpoint protein, a cytokine, and any combination thereof. In some embodiments, said transgene codes for a T cell receptor.

[0362] In some embodiments, said introducing comprises modifying or deleting one or more endogenous gene of at least a portion of said population of primary cells, resulting in said population of modified primary cells. In some embodiments, said endogenous gene comprise an immune checkpoint gene. In some embodiments, said endogenous gene comprises PD-1.

[0363] In one aspect, provided herein are methods of electroporating cells comprising: a first electroporation step to introduce a guided-ribonucleoprotein complex to said cells; and a second electroporation step comprising to introduce an exogenous polynucleic acid, thereby generating modified cells; wherein said modified cells have at least one of: an increase in a percentage of integration of said exogenous polynucleic acid comprising a cellular receptor sequence; or an increase in a percentage of viability as compared to comparable cells comprising a single electroporation consisting of a) and b).

[0364] In some embodiments, said exogenous polynucleic acid comprise a linearized double-strand DNA. In some embodiments, said electroporating comprises contacting said cells with a polynucleic acid that codes for said guided-nuclease. In some embodiments, said polynucleic acid comprises DNA. In some embodiments, said polynucleic acid comprises mRNA. In some embodiments, said electroporating comprises contacting said cells with said guided-nuclease. In some embodiments, said guided-nuclease comprises Cas proteins, Zinc finger nuclease, TALEN, meganucleases, homologues thereof, or modified versions thereof, or any combination thereof.

[0365] In some embodiments, said guided-nuclease comprises a Cas protein. In some embodiments, said Cas protein comprises Cas1, Cas1B, Cas2, Cas3, Cas4, Cas5, Cas6, Cas7, Cas8, Cas9, Cas10, Csy1, Csy2, Csy3, Cse1, Cse2, Csc1, Csc2, Csa5, Csn2, Csm2, Csm3, Csm4, Csm5, Csm6, Cmr1, Cmr3, Cmr4, Cmr5, Cmr6, Csb1, Csb2, Csb3, Csx17, Csx14, Csx10, Csx16, CsaX, Csx3, Csx1, Csx1S, Csf1, Csf2, CsO, Csf4, Cpf1, c2c1, c2c3, Cas9HiFi, homologues thereof, or modified versions thereof.

[0366] In some embodiments, said guide polynucleic acid comprises DNA that codes for a guide RNA. In some embodiments, said guide polynucleic acid comprises a guide RNA.

[0367] In some embodiments, said electroporating comprise contacting said population primary human cells with a guided-ribonucleoprotein complex that comprises said guide polynucleic acid and said guided-nuclease.

[0368] In some embodiments, said guide RNA comprises a CRISPR RNA (crRNA) and a transactivating crRNA (tracrRNA).

[0369] In some embodiments, said DNase is present at a concentration from about 5 μg/ml to about 15 μg/ml.

[0370] In some embodiments, said DNase is selected from the group consisting of: DNase I, Benzonase, Exonuclease I, Exonuclease III, Mung Bean Nuclease, Nuclease BAL 31, RNase I, S1 Nuclease, Lambda Exonuclease, RecJ, T7 exonuclease, restriction enzymes, and any combination thereof. In some embodiments, said DNase comprises DNase I.

[0371] In some embodiments, said contacting further comprises contacting said population of modified primary cells with an immune stimulatory agent. In some embodiments, said contacting with said immune stimulatory agent increases at least one of: a percent of viability; or a percent of expression of said transgene encoded by said exogenous polynucleic acid; in said population of modified primary cells as compared to a comparable population of modified primary cells to which said introducing but not said contacting is performed. In some embodiments, said immune stimulatory agent comprises B7, CD80, CD83, CD86, CD32, CD64, 4-1BBL, anti-CD3, anti-CD3 mAb, S-2-hydroxyglutarate, anti-CD28, anti-CD28 mAb, CD1d, anti-CD2, IL-15, IL-17, IL-21, IL-2, IL-7, truncated CD19, derivative thereof, or any combination. In some embodiments, said immune stimulatory agent comprises IL-2, IL-7, IL-15, or any combination thereof. In some embodiments, said immune stimulatory agent is present at a concentration from about 50 IU/ml to about 1000 IU/ml. In some embodiments, said immune stimulatory agent is configured to stimulate expansion of at least a portion of said cell population or said cells. In some embodiments, said contacting further comprises introducing into said population of modified cells a modulator of DNA double strand break repair.

[0372] In some embodiments, said introducing said modulator of DNA double strand break repair increases at least one of: a percent of viability; or a percent of expression of said transgene encoded by said exogenous polynucleic acid; in said population of modified primary cells as compared to a comparable population of modified primary cells to which said introducing but not said contacting is performed. In some embodiments, said modulator of DNA double strand break repair comprises NAC, anti-IFNAR2 antibody, or both. In some embodiments, said modulator of DNA double strand break repair comprises a protein involved in DNA double strand repair. In some embodiments, said protein involved in DNA double strand break repair comprises a protein selected from the group consisting of: Ku70, Ku80, BRCA1, BRCA2, RAD51, RS-1, PALB2, Nap1, p400 ATPase, EVL, NAC, MRE11, RAD50, RAD52, RAD55, RAD57, RAD54, RAD54B, Srs2, NBS1, H2AX, PARP-1, RAD18, DNA-PKcs, XRCC4, XLF, Artemis, TdT, pol μ and pol λ, ATM, AKT1, AKT2, AKT3, Nibrin, CtIP, EXO1, BLM, E4 orf6, E1b55K, homologs and derivatives thereof, Scr7, and any combination thereof. In some embodiments, said protein involved in DNA comprises RS-1, RAD51, or both.

[0373] In some embodiments, said contacting comprising contacting said population of modified primary cells in a substantially antibiotics-free media. In some embodiments, said primary immune cells comprises a cell selected from the group consisting of: a B cell, a basophil, a dendritic cell, an eosinophil, a gamma delta T cell, a granulocyte, a helper T cell, a Langerhans cell, a lymphoid cell, an innate lymphoid cell (ILC), a macrophage, a mast cell, a megakaryocyte, a memory T cell, a monocyte, a myeloid cell, a natural killer T cell, a neutrophil, a precursor cell, a plasma cell, a progenitor cell, a regulatory T-cell, a T cell, a thymocyte, any differentiated or de-differentiated cell thereof, or any mixture or combination of cells thereof. In some embodiments, said primary immune cells comprise primary T cells. In some embodiments, said primary T cells are isolated from a blood sample of a subject. In some embodiments, said subject is a human. In some embodiments, said blood sample is a whole blood sample or a fractioned blood sample. In some embodiments, said blood sample comprises isolated peripheral blood mononuclear cells. In some embodiments, said primary T cells comprise a gamma delta T cell, a helper T cell, a memory T cell, a natural killer T cell, an effector T cell, or any combination thereof. In some embodiments, said primary immune cells comprise CD3+ cells. In some embodiments, said primary immune cells comprise tumor infiltrating lymphocytes (TILs). In some embodiments, the TILs comprise T cells, B cells, natural killer cells, macrophages, differentiated or de-differentiated cell thereof, or any combination thereof.

[0374] In some embodiments, said contacting comprises contacting said TILs at the presence of co-cultured APCs. In some embodiments, said APCs are configured to stimulate expansion of said TILs. In some embodiments, said APCs express B7, CD80, CD83, CD86, CD32, CD64, 4-1BBL, anti-CD3, anti-CD3 mAb, S-2-hydroxyglutarate, anti-CD28, anti-CD28 mAb, CD1d, anti-CD2, membrane-bound IL-15, membrane-bound IL-17, membrane-bound IL-21, membrane-bound IL-2, truncated CD19, derivative thereof, or any combination thereof. In some embodiments, said introducing comprises disrupting one or more genomic sites of at least a portion of said population of primary cells, resulting in said population of modified primary cells.

[0375] In some embodiments, said transgene codes for a protein selected from the group consisting of: a cellular receptor, an immunological checkpoint protein, a cytokine, and any combination thereof. In some embodiments, said transgene codes for a T cell receptor.

[0376] In some embodiments, said introducing comprises modifying or deleting one or more endogenous gene of at least a portion of said population of primary cells, resulting in said population of modified primary cells. In some embodiments, said endogenous gene comprise an immune checkpoint gene. In some embodiments, said endogenous gene comprises PD-1.

[0377] In one aspect, provided herein are methods of treating cancer comprising administering a composition described herein or a population of modified cells generated by a method described herein to a subject in need thereof. In some embodiments, said subject is in need of said treatment. In some embodiments, said subject has been diagnosed with a cancer or a tumor. In some embodiments, said subject is a human. In some embodiments, said administering comprises transfusing said composition or said population of modified cells into blood vessels of said subject.

[0378] Provided herein is an engineered polynucleotide that comprises a sequence that comprises at least 60%, 70%, 80%, 85%, 90%, 95%, 97%, or 99% sequence identity with at least a portion of SEQ ID NO: 81 or SEQ ID NO: 84 as determined by BLAST.

[0379] Provided herein is also an engineered polynucleotide that comprises at least 60%, 70%, 80%, 85%, 90%, 95%, 97%, or 99% sequence identity with at least a portion of SEQ ID NO: 79 or SEQ ID NO: 82 as determined by BLAST.

[0380] Provided herein is a ribonucleoprotein (RNP) that comprises an engineered polynucleotide. An RNP can further comprise an endonuclease. In some aspects, an endonuclease comprises a CRISPR endonuclease.

[0381] Provided herein is a cell that comprises an engineered polynucleotide and/or an RNP.

[0382] Provided herein is a population of cells that comprises an engineered cell.

[0383] Provided herein is also a kit that comprises an engineered polynucleotide and/or a ribonucleoprotein in a container.

### BRIEF DESCRIPTION OF THE FIGURES

[0384] FIGS. 1A-C provide a schematic for introducing an insert sequence into an immune cell genome. FIG. 1A illustrates a polynucleotide construct. C1 and C2 represent sequences targeted for cleavage by a nuclease, for example, a sequence targeted by a guide RNA for cleavage by a CRISPR-associated nuclease. C1 and C2 can be the same sequence or different sequences. H1 and H2 represent homology arm sequences. “Insert” represents a sequence to be inserted in the genome. The construct is designed for insertion at a target site in the genome represented in FIG. 1B. C3 represents a sequence targeted for cleavage by a nuclease, which can be the same sequence as C1 and/or C2 or a different sequence. H1 and H2 in FIG. 1B represent sequences in the genome homologous to H1 and H2 in the polynucleotide construct. FIG. 1C illustrates the genome after introduction of the insert sequence by the methods of the disclosure.

[0385] FIG. 2 provides the results of an experiment demonstrating that an insert TCR sequence is not integrated into the genome or expressed by cells in experimental conditions without a nuclease or guide RNA. Each column represents a condition. Each row represents a sample derived from a different donor. The y-axes represent fluorescence from CD3 staining, and the X-axes represent fluorescence from staining for the insert TCR. The numbers represent the percentage of live cells that fall within the quadrant. Condition one is mock-treated cells. Condition 2 is cells receiving a DNA minicircle vector with 1000 bp homology arms. Condition 3 is cells receiving a DNA minicircle vector with 48 bp homology arms.

[0386] FIG. 3 illustrates that higher proportions and numbers of cells express an insert TCR in the experimental conditions with 48 base pair homology arms and minicircle-targeting guide RNAs (conditions 6 & 7) compared to the experimental conditions with the 1000 base pair homology arms (conditions 4 & 5). Each column represents a condition. Each row represents a sample derived from a different donor. The y-axes represent fluorescence from CD3 staining, and the X-axes represent fluorescence from staining for the insert TCR. The numbers represent the percentage of live cells that fall within the quadrant.

[0387] FIG. 4 provides the percentage of live cells that express insert TCR from various experimental conditions. Data are presented for samples processed from two donors, with two technical replicates per donor. The results illustrate that higher proportions and numbers of cells express the insert TCR in the experimental conditions with 48 base pair homology arms and minicircle-targeting guide RNAs (conditions 6 & 7) compared to the experimental conditions with the 1000 base pair homology arms (conditions 4 & 5). Condition 1 is mock-treated cells. Condition 2 is cells receiving a DNA minicircle vector with 1000 bp homology arms, but no guide RNA or nuclease. Condition 3 is cells receiving a DNA minicircle vector with 48 bp homology arms, but not guide RNA or nuclease.

[0388] FIG. 5 provides the percentage of live cells that express a GFP reporter from various experimental conditions. Data are presented for samples processed from two donors, with three technical replicates per donor. Condition 1 is mock-treated cells. Condition 2 is cells receiving a DNA minicircle vector with 1000 bp homology arms, but no guide RNA or nuclease. Condition 3 is cells receiving a DNA minicircle vector with 48 bp homology arms, but not guide RNA or nuclease. Conditions 4 & 5 are cells that received a DNA minicircle vector with 1000 bp homology arms, minicircle-targeting guide RNAs, and nuclease. Conditions 6&7 are cells that received a DNA minicircle vector with 48 bp homology arms, minicircle-targeting guide RNAs, and nuclease. The results illustrate efficient immune cell genome editing using methods that comprise single strand annealing.

[0389] FIG. 6A-FIG. 6E provide a schematic for editing an immune cell genome with methods of the disclosure comprising a polynucleotide construct with two homology arms and two cleavage sites. FIG. 6A illustrates a polynucleotide construct. C1 and C2 represent sequences targeted for cleavage by a nuclease, for example, sequences targeted by a guide RNA for cleavage by a CRISPR-associated nuclease. C1 and C2 can be the same sequence or different sequences. H1 and H2 represent homology arm sequences. “(insert)” represents an intervening sequence between the two homology arms, that can be present or absent. The construct is designed for insertion at a target site in the genome represented in FIG. 6B. FIG. 6B illustrates a target site in the immune cell genome. C3 represents a sequence targeted for cleavage by a nuclease, which can be the same sequence as C1 and/or C2 or a different sequence. H1 and H2 in FIG. 6B represent sequences in the genome homologous to H1 and H2 in the polynucleotide construct. FIG. 6C represents the polynucleotide construct of FIG. 6A that has been cleaved at C1 and C2 and undergone 5′ resection from the sites of the double stranded breaks, exposing single stranded sequences of the H1 and H2 homology arms. FIG. 6D represents the site in the immune cell genome from FIG. 6A that has been cleaved at C3. Each end exposed by the double-stranded break has undergone 5′ resection, exposing single stranded sequences homologous to the sequences in the H1 and H2 homology arms. FIG. 6E represents the genome after repair of the genome using the polynucleic acid construct or a part thereof as a repair template (e.g., repair via a pathway comprising single strand annealing, homology-mediated end joining, microhomology-mediated end joining, alternative end joining, homology-directed repair, homologous recombination, or a combination thereof).

[0390] FIG. 7A-FIG. 7E provide a schematic for editing an immune cell genome with methods of the disclosure comprising a polynucleotide construct with one homology arms and one cleavage site. FIG. 7A illustrates a polynucleotide construct. C1 represents a sequence targeted for cleavage by a nuclease, for example, a sequence targeted by a guide RNA for cleavage by a CRISPR-associated nuclease. H1 represents a homology arm sequences. “(insert)” represents an intervening sequence between the two homology arms, that can be present or absent. The construct is designed for insertion at a target site in the genome represented in FIG. 7B. FIG. 7B illustrates a target site in the immune cell genome. C2 represents a sequence targeted for cleavage by a nuclease, which can be the same sequence as C1 or a different sequence. H1 in FIG. 7B represents a sequence in the genome homologous to H1 in the polynucleotide construct. FIG. 7C represents the polynucleotide construct of FIG. 7A that has been cleaved at C1 and undergone 5′ resection from the sites of the double stranded break, exposing a single stranded sequence of the H1 homology arm. FIG. 7D represents the site in the immune cell genome from FIG. 7A that has been cleaved at C2. The end exposed by the double-stranded break has undergone 5′ resection, exposing single stranded sequences homologous to the sequence in the H1 homology arm. FIG. 7E represents the genome after repair of the genome using the polynucleic acid construct or a part thereof as a repair template (e.g., repair via a pathway comprising single strand annealing, homology-mediated end joining, microhomology-mediated end joining, alternative end joining, homology-directed repair, homologous recombination, or a combination thereof).

[0391] FIG. 8A-FIG. 8E provide a schematic for editing an immune cell genome with methods of the disclosure comprising a polynucleotide construct with two homology arms and two cleavage sites and introducing two double-stranded breaks in the immune cell genome (e.g., to facilitate a large deletion). FIG. 8A illustrates a polynucleotide construct. C1 and C2 represent sequences targeted for cleavage by a nuclease, for example, sequences targeted by a guide RNA for cleavage by a CRISPR-associated nuclease. C1 and C2 can be the same sequence or different sequences. H1 and H2 represent homology arm sequences. “(i)” represents an intervening sequence between the two homology arms, that can be present or absent. The construct is to bridge two target sites in the immune cell when inserted, thereby generating a deletion in the immune cell genome, with or without an insertion. FIG. 8B illustrates the two target sites in the immune cell genome. C3 and C3 represent sequences targeted for cleavage by a nuclease, each of which can be the same sequence as C1 and/or C2 or different sequence(s). H1 and H2 in FIG. 8B represent sequences in the genome homologous to H1 and H2 in the polynucleotide construct. FIG. 8C represents the polynucleotide construct of FIG. 8A that has been cleaved at C1 and C2 and undergone 5′ resection from the sites of the double stranded breaks, exposing single stranded sequences of the H1 and H2 homology arms. FIG. 8D represents the site in the immune cell genome from FIG. 8A that has been cleaved at C3 and C4. Each end exposed by the double-stranded breaks has undergone 5′ resection, exposing single stranded sequences homologous to the sequences in the H1 and H2 homology arms. FIG. 8E represents the genome after repair of the genome using the polynucleic acid construct or a part thereof as a repair template (e.g., repair via a pathway comprising single strand annealing, homology-mediated end joining, microhomology-mediated end joining, alternative end joining, homology-directed repair, homologous recombination, or a combination thereof).

[0392] FIG. 9A-FIG. 9C provide a schematic for introducing an insert sequence into an immune cell genome using a polynucleotide construct that comprises one homology arm and one cleavage site. FIG. 9A illustrates a polynucleotide construct. C1 represents a sequence targeted for cleavage by a nuclease, for example, a sequence targeted by a guide RNA for cleavage by a CRISPR-associated nuclease. H1 represents a homology arm sequence. “Insert” represents a sequence to be inserted in the genome. The construct is designed for insertion at a target site in the genome represented in FIG. 9B. C2 represents a sequence targeted for cleavage by a nuclease, which can be the same sequence as C1 or a different sequence. H1 in FIG. 9B represents a sequence in the genome homologous to H1 in the polynucleotide construct. FIG. 9C illustrates the genome after introduction of the insert sequence by the methods of the disclosure.

[0393] FIG. 10A-FIG. 10C provide a schematic for editing an immune cell genome of the disclosure (e.g., introducing a small INDEL). FIG. 10A illustrates a polynucleotide construct. C1 and C2 represent sequences targeted for cleavage by a nuclease, for example, a sequence targeted by a guide RNA for cleavage by a CRISPR-associated nuclease. C1 and C2 can be the same sequence or different sequences. H1 and H2 represent homology arm sequences. The construct is designed to act as a repair template for a target site in the genome represented in FIG. 10B. C3 represents a sequence targeted for cleavage by a nuclease, which can be the same sequence as C1 and/or C2 or a different sequence. H1 and H2 in FIG. 10B represent sequences in the genome homologous to H1 and H2 in the polynucleotide construct. FIG. 10C illustrates the genome after introduction of the insert sequence by the methods of the disclosure.

[0394] FIG. 11A-FIG. 11C provide a schematic for editing an immune cell genome of the disclosure (e.g., introducing a small INDEL) using a polynucleotide construct that comprises one homology arm and one cleavage site. FIG. 11A illustrates a polynucleotide construct. C1 represents a sequence targeted for cleavage by a nuclease, for example, a sequence targeted by a guide RNA for cleavage by a CRISPR-associated nuclease. H1 represents a homology arm sequence. The construct is designed to act as a repair template for a target site in the immune cell genome represented in FIG. 11B. C2 represents a sequence targeted for cleavage by a nuclease, which can be the same sequence as C1 or a different sequence. H1 in FIG. 11B represents a sequence in the genome homologous to H1 in the polynucleotide construct. FIG. 11C illustrates the genome after introduction of the insert sequence by the methods of the disclosure.

[0395] FIG. 12A-FIG. 12C provide a schematic for introducing an insert sequence into an immune cell genome with methods of the disclosure comprising a polynucleotide construct with two homology arms and two cleavage sites and introducing two double-stranded breaks in the immune cell genome (e.g., to facilitate a deletion). FIG. 12A illustrates a polynucleotide construct. C1 and C2 represent sequences targeted for cleavage by a nuclease, for example, a sequence targeted by a guide RNA for cleavage by a CRISPR-associated nuclease. C1 and C2 can be the same sequence or different sequences. H1 and H2 represent homology arm sequences. “Insert” represents a sequence to be inserted in the genome. The construct is designed for insertion at a target site in the genome represented in FIG. 12B. C3 and C4 represents sequences targeted for cleavage by a nuclease, each of which can be the same sequence as C1 and/or C2 or a different sequence. H1 and H2 in FIG. 12B represent sequences in the genome homologous to H1 and H2 in the polynucleotide construct. FIG. 12C illustrates the genome after introduction of the insert sequence and deletion of the sequence spanning H1 and H2 by the methods of the disclosure.

[0396] FIG. 13A-FIG. 13C provide a schematic for generating a deletion in an immune cell genome with methods of the disclosure comprising a polynucleotide construct with two homology arms and two cleavage sites and introducing two double-stranded breaks in the immune cell genome (e.g., to facilitate a deletion). FIG. 13A illustrates a polynucleotide construct. C1 and C2 represent sequences targeted for cleavage by a nuclease, for example, a sequence targeted by a guide RNA for cleavage by a CRISPR-associated nuclease. C1 and C2 can be the same sequence or different sequences. H1 and H2 represent homology arm sequences. The construct is designed to act as a repair template for target sites in the immune cell represented in FIG. 13B. C3 and C4 represents sequences targeted for cleavage by a nuclease, each of which can be the same sequence as C1 and/or C2 or a different sequence. H1 and H2 in FIG. 13B represent sequences in the genome homologous to H1 and H2 in the polynucleotide construct. FIG. 13C illustrates the genome after use of the polynucleotide construct as a repair template to generate a deletion of the sequence spanning H1 and H2 in the immune cell genome by the methods of the disclosure.

[0397] FIG. 14 shows an image taken 24 hours following electroporation of an activated T cell culture with plasmid donor vector in 6-well dish in the presence or absence of DNase in the culture medium. The figure clearly demonstrates cell clumping in the absence of DNase, while no cell clumps were visible in the culture that has DNase.

[0398] FIG. 15A shows percent recovery of transfected cells 24 hours post-electroporation of a plasmid in the presence or absence of DNase in the culture medium, FIG. 15B is a graph quantifying the percent recovery in each condition. Both figures demonstrate lymphocyte survival after transfection was increased in the culture that has DNase as compared in the culture without DNase. FIG. 15C shows percent expression of GFP+ cells on day 14 post electroporation of a plasmid donor on day 0 or day 1, with or without DNase treatment. FIG. 15D shows percent expression of mTCR+ cells on day 14 post electroporation of a plasmid donor on day 0 or day 1, with or without DNase treatment. Both FIGS. 15B and 15D both demonstrate transgene integration was increased in the culture that has DNase as compared in the culture without DNase.

[0399] FIG. 16A shows percent expression of GFP+ cells on day 14 post electroporation of a plasmid donor on day 0 or day 1, Cas9, gRNA, in the presence or absence of RS1, DNase, or RS1 and DNase. FIG. 16B shows percent expression of mTCR+ cells on day 14 post electroporation of a plasmid donor on day 0 or day 1, Cas9, gRNA, in the presence or absence of RS1, DNase, or RS1 and DNase. Results show increased transgene expression with RS1, and/or Dnase treatment.

[0400] FIG. 17A shows day 7 percent GFP expression of T cells electroporated on day 0 post stimulation with pulse (control), Cas9 and gRNA, donor (GFP), donor and DNase, or donor, DNase, and RS-1. FIG. 17B shows day 7 percent mTCR expression of T cells electroporated on day 0 post stimulation with pulse (control), Cas9 and gRNA, donor (GFP), donor and DNase, or donor, DNase, and RS-1 (post-transfection only). FIG. 17C shows day 7 percent GFP expression of T cells electroporated on day 1 post stimulation with pulse (control), Cas9 and gRNA, donor (GFP), donor and DNase, or donor, DNase, and RS-1 (post-transfection or both pre- and post-transfection). FIG. 17D shows day 7 percent mTCR expression of T cells electroporated on day 1 post stimulation with pulse (control), Cas9 and gRNA, donor (GFP), donor and DNase, or donor, DNase, and RS-1 (post-transfection or both pre- and post-transfection). Results show increased transgene expression with RS1, and/or DNase treatment.

[0401] FIG. 18A shows day 14 percent GFP or mTCR expression of T cells electroporated on day 0 post stimulation with pulse (control), Cas9 and gRNA, donor (GFP or mTCR), donor and DNase, or donor, DNase, and RS-1 (post-transfection only). FIG. 18B shows day 14 percent GFP or mTCR expression of T cells electroporated on day 1 post stimulation with pulse (control), Cas9 and gRNA, donor (GFP or mTCR), donor and DNase, or donor, DNase, and RS-1 (post-transfection or both pre- and post-transfection). Results show increased stable transgene expression 14 days post-transfection with RS1, and/or DNase treatment.

[0402] FIG. 19 shows FACs analysis of electroporation efficiency for donor 055330 electroporated with or without RS-1, or DNase and a mTCR at 36 hours post stimulation or 36 hours post stimulation and 6 hours post initial electroporation. Results show increased transgene expression with RS1, and/or DNase treatment at both time points, suggesting the lasting effect of the treatment.

[0403] FIG. 20 shows FACs analysis of electroporation efficiency for donor 119866 electroporated with or without RS-1, or DNase and a mTCR at 36 hours post stimulation or 36 hours post stimulation and 6 hours post initial electroporation. Results show increased transgene expression with RS1, and/or DNase treatment at both time points, suggesting the lasting effect of the treatment.

[0404] FIG. 21A shows FACs analysis of electroporation efficiency for donors 055330 and 119866 electroporated with or without RS-1, or DNase and a mTCR at 36 hours post stimulation and 24 hours post initial electroporation. FIG. 21B shows FACs analysis of electroporation efficiency for donor 120534 electroporated with or without RS-1, or DNase and a mTCR at 36 hours post stimulation or 36 hours post stimulation and 6 hours post initial electroporation. Results show increased transgene expression with RS1, and/or DNase treatment at both time points, suggesting the lasting effect of the treatment

[0405] FIG. 22A shows graphs of viable cell count (number of viable cells) on day 2 post-electroporation with or without N-acetyl-cysteine (NAC), Akt VIII inhibitor (Akt Inh), or anti-IFNAR2 antibody (IFN Ab). FIG. 22B shows graphs of viable cell count (number of viable cells) on day 5 post-electroporation with or without N-acetyl-cysteine (NAC), Akt VIII inhibitor (Akt Inh), or anti-IFNAR2 antibody (IFN Ab). FIG. 22C shows graphs of viable cell count (number of viable cells) on day 7 post-electroporation with or without N-acetyl-cysteine (NAC), Akt VIII inhibitor (Akt Inh), or anti-IFNAR2 antibody (IFN Ab).

[0406] FIG. 23A shows graphs of viable cell count (percentage of viable cells) on day 2 post-electroporation with or without N-acetyl-cysteine (NAC), Akt VIII inhibitor (Akt Inh), or anti-IFNAR2 antibody (IFN Ab). FIG. 23B shows graphs of viable cell count (percentage of viable cells) on day 5 post-electroporation with or without N-acetyl-cysteine (NAC), Akt VIII inhibitor (Akt Inh), or anti-IFNAR2 antibody (IFN Ab). FIG. 23C shows graphs of viable cell count (percentage of viable cells) on day 7 post-electroporation with or without N-acetyl-cysteine (NAC), Akt VIII inhibitor (Akt Inh), or anti-IFNAR2 antibody (IFN Ab).

[0407] FIG. 24 shows a graph of percentage of mTCR positive cells on day 7 post-electroporation with or without N-acetyl-cysteine (NAC), Akt VIII inhibitor (Akt Inh), or anti-IFNAR2 antibody (IFN Ab). Figure demonstrates that transgene expression was increased in the culture that contains IFN Ab as compared to in the control culture when 30 or 50 μg exogenous donor DNA was used.

[0408] FIG. 25A shows cytoflex results of total live cells that have undergone a second stimulation post electroporation utilizing an AAVS1-GFP donor comprising homology arms (HR) or single strand annealing (SSA) that target AAVS1. FIG. 25B shows percent GFP post electroporation and a secondary stimulation of the same cells electroporated with the AAVS1-GFP donor. GFP was measured at day 7 post electroporation. The second stimulation was added about 30 minutes after the electroporation.

[0409] FIG. 26A shows flow cytometry plots of HCT1116 cells comprising a knockout of RAD52, Exo1, RAD54B, Lig3, BRD, or PolQ. Knocked out HCT1116 cells were electroporated with an AAVS1 SA-GFP donor via SSA or HR, results were acquired on day 10 post electroporation and normalized to control. FIG. 26B shows percent change in GFP expression of HR donor templates normalized to wild type (WT). FIG. 26C shows percent change in GFP expression of SSA donor templates normalized to wild type (WT).

[0410] FIG. 27 is a schematic of an exemplary strategy to knock in a transgene, such as a transgene that comprises a cellular receptor such as a CAR or TCR into an exemplary gene, such as an immune checkpoint and/or TCR, provided in Table 1.

[0411] FIG. 28A shows percent of T cells in S phase of the cell cycle at 24 hrs., 36 hr., 48 hrs., or 72 hrs. post electroporation with either control (pulse only) or an HR transgene donor.

[0412] FIG. 28B shows percent GFP on day 7 post electroporation with control (pulse only), HR SA-GFP donor, or SSA SA GFP minicircle (MC). FIG. 28C shows percent CAR (CD34+) on day 7 post electroporation with control (pulse only) or SSA anti-mesothelin CAR minicircle (MC). Percent GFP and CAR were compared against cells electroporated at 24 hrs., 36 hrs., 48 hrs., or 72 hrs.

[0413] FIG. 29A shows fold change above baseline of DNA sensors, their timing, and expression after 36 hrs. This aligns with the cell cycle mapped on the X axis. A transfection zone around 36 hrs. is shown as a shaded box. FIG. 29B shows percent of T cells in S-phase of two T cell donors at 24, 36, 48, and 72 hrs. post stimulation. FIG. 29C shows percent GFP in T cells stimulated using anti-CD3 and anti-CD28 coated beads, comprising anti-CD3 and -CD28, and electroporated with the SA-GFP plasmid alone (plasmid control) or the SA-Donor in combination with Cas9 and AAVS1 gRNA (HR) at 24 hrs., 36 hrs., 48 hrs., or 72 hrs., post-stimulation.

[0414] FIG. 30A shows perfect GFP expression in T cells stimulated with anti-CD3 and anti-CD28 coated beads for 36 hours and electroporated with the donor plasmid alone or in combination with the CRISPR Cas9 reagents. Both the HR and HMEJ cargo is the SA-GFP construct integrated at AAVS1. Plasmid was delivered alone or in combination with Cas9 mRNA and AAVS1 gRNA (HR), or for HMEJ Cas9 mRNA and AAVS1 gRNA and universal gRNA. Constructs contain a 1 kb insert cargo. FIG. 30B shows percent expression of a murine TCR (KRAS G12D TCR) insert transfected via an HR-mTCR or SSA-mTCR (HMEJ) as compared to plasmid control. Briefly, T cells were stimulated with anti-CD3 and anti-CD28 coated beads for 36 hours and electroporated with the donor plasmid alone or in combination with the CRISPR Cas9 reagents. Both the HR and HMEJ cargo is the MND-anti-KRAS TCR with 1 kb homology (for HR) and with 48 bp homology (HMEJ). Plasmid was delivered alone or in combination with Cas9 mRNA and AAVS1 gRNA (HR), or for HMEJ Cas9 mRNA, AAVS1 gRNA and Universal gRNA.

[0415] FIG. 31A shows an exemplary workflow of non-viral cellular manufacturing. (1) T cells are isolated and purified (2) T cells are activated via addition of beads and/or suitable stimulatory antibodies (3) Activation beads are removed (4) Activated T cells are electroporated and (5) Modified cells are expanded. FIG. 31B shows fold expansion of cells manufactured using the exemplary workflow of FIG. 31A and electroporated with a plasmid control, HR, or HMEJ construct. FIG. 31C shows an exemplary optional workflow comprising additional stimulation, as denoted by the second bead addition after electroporation.

[0416] FIG. 32A shows fold expansion of T cells electroporated with a murine TCR (KRAS G12D TCR) insert delivered via an HR-mTCR or SSA-mTCR (HMEJ) transgene as compared to plasmid control. Also shown are re-stimulated SSA-mTCR (HMEJ) cells. FIG. 32B shows percent anti-mesothelin CAR expression (CD34 expression) of cells transfected with the SSA-mTCR (HMEJ) transgene or SSA-mTCR (HMEJ) transgene and also restimulated as compared to control (pulse only). FIG. 32C shows luminescence data of the same cells.

[0417] FIG. 33 shows GFP expression of CD4 and CD8 cells electroporated with plasmid only, plasmid, Cas9 mRNA, and AAVS1 gRNA (HR), or plasmid, cas9 mRNA, AAVS1 gRNA and Universal gRNA for HMEJ.

[0418] FIG. 34A shows percent knock in of T cells electroporated with donor only (control), SA-eGFP-pA (HR), or SA-eGFP-pA (HMEJ) constructs comprising homology arms from 48, 100, 250, 500, 750, or 1000 base pairs in length. FIG. 34B shows a bar graph showing targeted integration rates using the SA-eGFP-pA (HR), or SA-eGFP-pA (HMEJ) constructs with increasing homology arm length, as described in FIG. 34A.

[0419] FIG. 35A cell expansion following targeted integration using donor only (control), SA-eGFP-pA (HR), or SA-eGFP-pA (HMEJ) constructs, comprising increasing homology arm length, with or without additional stimulation. FIG. 35B shows a bar graph of the same data as described in FIG. 35A.

[0420] FIG. 36 shows an exemplary clinical workflow. The provided workflow can be modified to include an additional stimulation of the T cells as described herein.

### DETAILED DESCRIPTION

### Introduction

[0421] Genetically-edited immune cells hold great promise as potential therapies for a range of disorders, including cancers, autoimmune disorders, inflammatory disorders, and infectious diseases. To realize this potential, techniques are needed to introduce desired modifications into the immune cell genome efficiently, while preserving cellular viability. Disclosed herein, in some embodiments, are genetically-edited immune cells, improved methods of genetically editing immune cells, and methods of therapy. Modifications that can be introduced into the immune cell genome include, for example, insertions, deletions, sequence replacement, (e.g., substitutions), and combinations thereof.

[0422] A number of existing methods of genetically editing immune cells rely on homologous recombination pathways. For example, a double-stranded break can be introduced into the genome, and a repair template provided to direct repair of the double-stranded break via homologous recombination. To direct repair via homologous recombination, repair templates can require long homology arms (e.g., about 500-1500 base pair homology arms). Methods that rely on repair via homologous recombination can have limitations, for example, because of the size of the homology arms required, because of the efficiency of repair, or a combination thereof. In the methods disclosed herein, double-stranded breaks can be introduced in the repair template as well as the target site in the genome. This can allow integration of the repair template via alternate or additional repair pathways, for example, pathways that comprise end resection, pathways that require only short homology arms in the repair template, or a combination thereof. Non-limiting examples of alternate or additional repair pathways that can be utilized include pathways comprising single strand annealing, homology-mediated end joining, microhomology-mediated end joining, alternative end joining, and combinations thereof.

[0423] The methods disclosed herein can have advantages over existing methods of editing immune cells, for example, higher editing efficiency, higher viability of edited cells, the ability to generate larger populations of edited cells, the ability to generate edited cells with enhanced proliferative capacity and/or effector functions, the ability to use smaller repair template constructs (e.g., comprising shorter homology arms), the ability to introduce larger sequences into the immune cell genome (e.g., at higher efficiency), the ability to introduce multiple modifications into the immune cell genome (e.g., insertions, deletions, substitutions, and/or or other modifications), and combinations thereof.

### Genetically-Modified Cells

[0424] Disclosed herein, in some embodiments, are genetically-edited cells, and methods of editing cells. In some embodiments, the cells comprise kidney cells, liver cells, pancreatic cells, blood cells, immune cells, lymphocytes, heart cells, lung cells, stem cells, ovary cells, prostate cells, muscle cells, tendon cells, ligament cells, cardiac cells, bone cells, bone marrow cells, cornea cells, retinal cells, cartilage cells, endothelial cells, cervical cells, breast cells, nervous system cells, spinal cord cells, brain cells, neurons, skin cells, epithelial cells, gastrointestinal cells, hormone secreting cells, pancreatic R cells, thyroid cells, thymus cells, exocrine cells, and parathyroid cells.

[0425] Disclosed herein, in some embodiments, are genetically-edited immune cells, and methods of editing immune cells. In some embodiments, the immune cells comprise lymphocytes, T cells, CD4+ T cells, CD8+ T cells, alpha-beta T cells, gamma-delta T cells, T regulatory cells (Tregs), cytotoxic T lymphocytes, Th1 cells, Th2 cells, Th17 cells, Th9 cells, naïve T cells, memory T cells, effector T cells, effector-memory T cells (T_{EM}), central memory T cells (T_{CM}), resident memory T cells (T_{RM}), Natural killer T cells (NKTs), tumor-infiltrating lymphocytes (TILs), Natural killer cells (NKs), Innate Lymphoid Cells (ILCs), B cells, B1 cells, B1a cells, B1b cells, B2 cells, plasma cells, B regulatory cells, antigen presenting cells (APCs), monocytes, macrophages, M1 macrophages, M2 macrophages, dendritic cells, plasmacytoid dendritic cells, neutrophils, mast cells, or a combination thereof.

[0426] In some embodiments, the immune cells are a cell line. For example, a cell line can be a population of cells that have undergone mutation and gained the ability to proliferate extensively in culture.

[0427] Immune cells of the disclosure can be human mammalian cells. Immune cells of the disclosure can be human immune cells. Immune cells of the disclosure can be mouse immune cells. Immune cells of the disclosure can be rat immune cells. Immune cells of the disclosure can be rabbit immune cells. Immune cells of the disclosure can be goat immune cells. Immune cells of the disclosure can be non-human primate immune cells. Immune cells of the disclosure can be pig immune cells. Immune cells of the disclosure can be llama immune cells. Immune cells of the disclosure can be goat immune cells. Immune cells of the disclosure can be immune cells from a genetically-modified animal.

[0428] In some embodiments, the immune cells are primary cells. In some embodiments, genetic editing of immune cells can be conducted ex vivo or in vitro. For example, primary cells can be harvested from a donor organism, genetically-edited, and infused into a recipient organism or back into the donor organism. In some embodiments, genetic editing of primary cells can be conducted within an organism (e.g., in vivo).

### Polynucleic Acid Constructs

[0429] Disclosed herein, in some embodiments, are methods of genetically editing immune cells, for example, introducing insertions, deletions, sequence replacements, and combinations thereof in the immune cell. Polynucleic acid constructs can be used in the methods of the disclosure, for example, used to provide a repair template to direct the repair of a double-stranded break in the immune cell genome. A repair template can favor a certain outcome of the repair process, for example, a repaired genome comprising an insertion, deletion, replaced sequence, or any combination thereof.

[0430] Polynucleic acid constructs can comprise, for example, one or more homology arms and one or more cleavage sites that can be targeted for cleavage by a nuclease (e.g., targeted by a guide RNA and Cas9). In some embodiments, polynucleic acids constructs comprise an insert sequence.

[0431] In the methods disclosed herein, double-stranded breaks can be introduced in the repair template as well as the target site in the genome. This can allow integration of the repair template via alternate or additional repair pathways, for example, pathways that comprise end resection, pathways that require only short homology arms in the repair template, or a combination thereof. Non-limiting examples of alternate or additional repair pathways that can be utilized include pathways comprising single strand annealing, homology-mediated end joining, microhomology-mediated end joining, alternative end joining, and combinations thereof.

[0432] A polynucleic acid construct can comprise DNA, RNA, chemically-modified nucleotides, or a combination thereof. In some embodiments, the polynucleic acid construct comprises DNA. In some embodiments, the polynucleic acid comprises RNA. In some embodiments, the polynucleic acid comprises RNA and can be reverse transcribed into complementary DNA. In some embodiments, the polynucleic acid comprises a DNA minicircle. In some embodiments, the polynucleic acid construct comprises a plasmid. In some embodiments, the polynucleic acid comprises a linear DNA, e.g., a PCR product, a linear DNA liberated from a DNA minicircle or plasmid, or a synthetically-produced DNA. In some embodiments, the polynucleic acid construct comprises a circular RNA. In some embodiments, polynucleic acid construct comprises chemical modifications (e.g., as disclosed herein).

[0433] In some embodiments, the polynucleic acid construct is contained in a viral vector. Exemplary viral vectors include, but are not limited to, lentiviral vectors, retroviral vectors, adeno-associated viral vectors (AAV), adenoviral vectors, herpes simplex viral vectors, alphaviral vectors, flaviviral vectors, rhabdoviral vectors, measles viral vectors, Newcastle disease viral vectors, poxviral vectors, and picornaviral vectors. In some embodiments, the polynucleic acid construct is contained in an AAV viral vector.

[0434] Disclosed herein, in some embodiments, are methods of introducing a plurality of modifications in an immune cell genome (e.g., an insertion and a deletion, multiple insertions, multiple deletions, an insertion and multiple deletions, multiple insertions and a deletion, or multiple insertions and multiple deletions).

### Insert Sequence

[0435] In some embodiments, the methods disclosed herein allow for or comprise insertion of an insert sequence into the genome of an immune cell. In some embodiments, the insert sequence is a polynucleic acid, e.g., a DNA sequence. In some embodiments, polynucleic acid constructs comprise an insert sequence.

[0436] In some embodiments, the insert sequence is at least 10 bp, 20 bp, 30 bp, 40 bp, 50 bp, 60 bp, 70 bp, 80 bp, 90 bp, 100 bp, 150 bp, 200 bp, 250 bp, 300 bp, 400 bp, 500 bp, 600 bp, 700 bp, 800 bp, 900 bp, 1 kb, 2 kb, 3 kb, 4 kb, 5 kb, 10 kb, 20 kb, 50 kb, 100 kb, 200 kb, 300 kb, 400 kb, 500 kb, 600 kb, 700 kb, 800 kb, 900 kb, 1000 kb, or more. In some embodiments, the insert sequence is greater than 0.5 kb, 1 kb, 2 kb, 3 kb, 4 kb, 5 kb, 10 kb, 20 kb, 50 kb, 100 kb, 200 kb, 300 kb, 400 kb, 500 kb, 600 kb, 700 kb, 800 kb, 900 kb, or 1000 kb.

[0437] In some embodiments, the insert sequence is from about 500 bp to 500 kb, 500 bp to 400 kb, 500 bp to 300 kb, 500 bp to 200 kb, 500 bp to 100 kb, 500 bp to 50 kb, 500 bp to 40 kb, 500 bp to 30 kb, 500 bp to 20 kb, 500 bp to 10 kb, 500 bp to 9 kb, 500 bp to 8 kb, 500 bp to 7 kb, 500 bp to 6 kb, 500 bp to 5 kb, 500 bp to 4 kb, 500 bp to 3 kb, 500 bp to 2 kb, or 500 bp to 1 kb. In some embodiments, the insert sequence is from about 1 kb to 500 kb, 1 kb to 400 kb, 1 kb to 300 kb, 1 kb to 200 kb, 1 kb to 200 kb, 1 kb to 100 kb, 1 kb to 90 kb, 1 kb to 80 kb, 1 kb to 70 kb, 1 kb to 60 kb, 1 kb to 50 kb, 1 kb to 40 kb, 1 kb to 30 kb, 1 kb to 20 kb, 1 kb to 10 kb, 1 kb to 9 kb, 1 kb to 8 kb, 1 kb to 7 kb, 1 kb to 6 kb, 1 kb to 5 kb, 1 kb to 4 kb, 1 kb to 3 kb, or 1 kb to 2 kb. In some embodiments, the insert sequence is from about 2 kb to 500 kb, 2 kb to 400 kb, 2 kb to 300 kb, 2 kb to 200 kb, 2 kb to 200 kb, 2 kb to 100 kb, 2 kb to 90 kb, 2 kb to 80 kb, 2 kb to 70 kb, 2 kb to 60 kb, 2 kb to 50 kb, 2 kb to 40 kb, 2 kb to 30 kb, 2 kb to 20 kb, 1 kb to 10 kb, 2 kb to 9 kb, 2 kb to 8 kb, 2 kb to 7 kb, 2 kb to 6 kb, 2 kb to 5 kb, 2 kb to 4 kb, or 2 kb to 3 kb. In some embodiments, the insert sequence is from about 3 kb to 500 kb, 3 kb to 400 kb, 3 kb to 300 kb, 3 kb to 200 kb, 3 kb to 200 kb, 3 kb to 100 kb, 3 kb to 90 kb, 3 kb to 80 kb, 3 kb to 70 kb, 3 kb to 60 kb, 3 kb to 50 kb, 3 kb to 40 kb, 3 kb to 30 kb, 3 kb to 20 kb, 1 kb to 10 kb, 3 kb to 9 kb, 3 kb to 8 kb, 3 kb to 7 kb, 3 kb to 6 kb, 3 kb to 5 kb, or 3 kb to 4 kb. In some embodiments, the insert sequence is from about 4 kb to 500 kb, 4 kb to 400 kb, 4 kb to 300 kb, 4 kb to 200 kb, 4 kb to 200 kb, 4 kb to 100 kb, 4 kb to 90 kb, 4 kb to 80 kb, 4 kb to 70 kb, 4 kb to 60 kb, 4 kb to 50 kb, 4 kb to 40 kb, 4 kb to 30 kb, 4 kb to 20 kb, 1 kb to 10 kb, 4 kb to 9 kb, 4 kb to 8 kb, 4 kb to 7 kb, 4 kb to 6 kb, or 4 kb to 5 kb. In some embodiments, the insert sequence is from about 5 kb to 500 kb, 5 kb to 400 kb, 5 kb to 300 kb, 5 kb to 200 kb, 5 kb to 200 kb, 5 kb to 100 kb, 5 kb to 90 kb, 5 kb to 80 kb, 5 kb to 70 kb, 5 kb to 60 kb, 5 kb to 50 kb, 5 kb to 40 kb, 5 kb to 30 kb, 5 kb to 20 kb, 1 kb to 10 kb, 5 kb to 9 kb, 5 kb to 8 kb, 5 kb to 7 kb, or 5 kb to 6 kb. In some embodiments, the insert sequence is from about 10 kb to 500 kb, 10 kb to 400 kb, 10 kb to 300 kb, 10 kb to 200 kb, 10 kb to 200 kb, 10 kb to 100 kb, 10 kb to 90 kb, 10 kb to 80 kb, 10 kb to 70 kb, 10 kb to 60 kb, 10 kb to 50 kb, 10 kb to 40 kb, 10 kb to 30 kb, or 10 kb to 20 kb. In some embodiments, the insert sequence is from about 30 kb to 500 kb, 30 kb to 400 kb, 30 kb to 300 kb, 30 kb to 200 kb, 30 kb to 200 kb, 30 kb to 100 kb, 30 kb to 90 kb, 30 kb to 80 kb, 30 kb to 70 kb, 30 kb to 60 kb, 30 kb to 50 kb, or 30 kb to 40 kb.

[0438] In some embodiments, the insert sequence does not encode a protein. In some embodiments, the insert sequence is less than 500 bp, 400 bp, 300 bp, 200 bp, 100 bp, 50 bp, 40 bp, 30 bp, 20 bp, 10 bp 5 bp, 4 bp, 3 bp, or 2 bp.

[0439] An insert sequence can comprise, for example, a non-coding sequence, a sequence that encodes an RNA, a sequence that encodes a protein, or a combination thereof. In some embodiments, the insert sequence does not encode for a functional protein. In some embodiments, the insert sequence encodes for a protein. In some embodiments, the insert sequence encodes for a functional protein.

[0440] In some embodiments, the insert sequence encodes at least one protein. In some embodiments, the insert sequence encodes a membrane protein. In some embodiments, the insert sequence encodes a transmembrane protein. In some embodiments, the insert sequence encodes a transmembrane receptor protein. In some embodiments, the insert sequence encodes an intracellular protein (e.g., a cytoplasmic or nuclear protein). In some embodiments, the insert sequence encodes a secreted protein. In some embodiments, the insert sequence encodes a chimeric protein. In some embodiments, the insert sequence encodes a fusion protein.

[0441] In some embodiments, the insert sequence encodes a receptor expressed on the surface of an immune cell (for example, a receptor expressed on the surface of a T cell, CD4+ T cell, CD8+ T cell, alpha-beta T cell, gamma-delta T cell, T regulatory cell (Treg), cytotoxic T lymphocyte, memory T cell, effector T cell, effector-memory T cell (T_{EM}), central memory T cell (T_{CM}), resident memory T cell (T_{RM}), naïve T cell, B cell, plasma cell, NK cell, NK T cell, monocyte, macrophage, dendritic cell, antigen presenting cell, neutrophil, or tumor infiltrating lymphocyte).

[0442] In some embodiments, the insert sequence encodes a T cell receptor (TCR) or a functional portion thereof. In some embodiments, the insert sequence encodes a chimeric antigen receptor (CAR) or a functional portion thereof. In some embodiments, the insert sequence encodes a B cell receptor or a functional portion thereof. In some embodiments, the insert sequence encodes a chemokine receptor. In some embodiments, the insert sequence encodes a cytokine receptor. In some embodiments, the insert sequence encodes a fusion protein comprising one or more antigen recognition domains (e.g., an antigen recognition domain of a TCR, BCR, antibody or antigen-binding fragment thereof, DARPin etc.), one or more transmembrane domains, and one or more signaling domains (e.g., a signaling domain from a TCR, BCR, immune co-receptor, cytokine receptor, chemokine receptor, immunoreceptor tyrosine-based inhibitory domain (ITIM), immunoreceptor tyrosine-based activation domain (ITAM), immune checkpoint gene, or a combination thereof).

[0443] In some embodiments, the insert sequence encodes a receptor that specifically binds to an antigen or neoantigen expressed by a cancer cell. In some embodiments, the insert sequence encodes a receptor that specifically binds to an antigen or neoantigen expressed or presented on the surface of a cancer cell. In some embodiments, the antigen or neoantigen is from an oncogene or tumor suppressor gene (e.g., a mutated tumor suppressor gene). In some embodiments, the antigen comprises a T cell epitope. In some embodiments, the cancer is a solid tumor, hematological cancer, or soft tissue cancer. In some embodiments, the cancer cell is selected from the group consisting of bladder cancer, epithelial cancer, bone cancer, brain cancer, breast cancer, colorectal cancer, esophageal cancer, gastrointestinal cancer, leukemia, liver cancer, lung cancer, lymphoma, myeloma, ovarian cancer, prostate cancer, sarcoma, stomach cancer, thyroid cancer, acute lymphocytic cancer, acute myeloid leukemia, alveolar rhabdomyosarcoma, anal canal, rectal cancer, ocular cancer, cancer of the neck, gallbladder cancer, pleural cancer, oral cancer, cancer of the vulva, colon cancer, cervical cancer, fibrosarcoma, gastrointestinal carcinoid tumor, Hodgkin lymphoma, kidney cancer, mesothelioma, mastocytoma, melanoma, multiple myeloma, myeloma, nasopharynx cancer, non-Hodgkin lymphoma, pancreatic cancer, peritoneal cancer, renal cancer, skin cancer, small intestine cancer, stomach cancer, testicular cancer, and thyroid cancer. In some embodiments, the cancer cell is selected from the group consisting of gastrointestinal cancer, breast cancer, lymphoma, and prostate cancer.

[0444] In some embodiments, the insert sequence encodes a protein that specifically binds to an antigen expressed by a pathogen. In some embodiments, the insert sequence encodes a receptor (e.g., immune receptor) that specifically binds to an antigen expressed by a pathogen. In some embodiments, the antigen comprises a T cell epitope. In some embodiments, the pathogen is a bacterium, virus, fungus, yeast, parasite (e.g., single-celled or multicellular eukaryotic parasite), or other microorganism.

[0445] In some embodiments, the insert sequence encodes a protein that specifically binds to an antigen associated with a disease (e.g., an inflammatory or autoimmune disease). In some embodiments, the insert sequence encodes a receptor (e.g., immune receptor) that specifically binds to an antigen associated with a disease. In some embodiments, the antigen comprises a T cell epitope. In some embodiments, the disease is acute disseminated encephalomyelitis, acute motor axonal neuropathy, Addison's disease, adiposis dolorosa, adult-onset still's disease, alopecia areata, ankylosing spondylitis, anti-glomerular basement membrane nephritis, anti-neutrophil cytoplasmic antibody-associated vasculitis, anti-n-methyl-d-aspartate receptor encephalitis, antiphospholipid syndrome, antisynthetase syndrome, aplastic anemia, autoimmune angioedema, autoimmune encephalitis, autoimmune enteropathy, autoimmune hemolytic anemia, autoimmune hepatitis, autoimmune inner ear disease, autoimmune lymphoproliferative syndrome, autoimmune neutropenia, autoimmune oophoritis, autoimmune orchitis, autoimmune pancreatitis, autoimmune polyendocrine syndrome, autoimmune polyendocrine syndrome type 2, autoimmune polyendocrine syndrome type 3, autoimmune progesterone dermatitis, autoimmune retinopathy, autoimmune thrombocytopenic purpura, autoimmune thyroiditis, autoimmune urticaria, autoimmune uveitis, balo concentric sclerosis, behçet's disease, bickerstaffs encephalitis, bullous pemphigoid, celiac disease, chronic fatigue syndrome, chronic inflammatory demyelinating polyneuropathy, churg-strauss syndrome, cicatricial pemphigoid, cogan syndrome, cold agglutinin disease, complex regional pain syndrome, crest syndrome, crohn's disease, dermatitis herpetiformis, dermatomyositis, diabetes mellitus type 1, discoid lupus erythematosus, endometriosis, enthesitis, enthesitis-related arthritis, eosinophilic esophagitis, eosinophilic fasciitis, epidermolysis bullosa acquisita, erythema nodosum, essential mixed cryoglobulinemia, evans syndrome, felty syndrome, fibromyalgia, gastritis, gestational pemphigoid, giant cell arteritis, goodpasture syndrome, graves' disease, graves ophthalmopathy, guillain-barré syndrome, hashimoto's encephalopathy, hashimoto thyroiditis, henoch-schonlein purpura, hidradenitis suppurativa, idiopathic dilated cardiomyopathy, idiopathic inflammatory demyelinating diseases, IgA nephropathy, IgG4-related systemic disease, inclusion body myositis, inflamatory bowel disease, intermediate uveitis, interstitial cystitis, juvenile arthritis, kawasaki's disease, lambert-eaton myasthenic syndrome, leukocytoclastic vasculitis, lichen planus, lichen sclerosus, ligneous conjunctivitis, linear IgA disease, lupus nephritis, lupus vasculitis, lyme disease (chronic), ménière's disease, microscopic colitis, microscopic polyangiitis, mixed connective tissue disease, mooren's ulcer, morphea, mucha-habermann disease, multiple sclerosis, myasthenia gravis, myocarditis, myositis, neuromyelitis optica, neuromyotonia, opsoclonus myoclonus syndrome, optic neuritis, ord's thyroiditis, palindromic rheumatism, paraneoplastic cerebellar degeneration, parry romberg syndrome, parsonage-turner syndrome, pediatric autoimmune neuropsychiatric disorder associated with Streptococcus, pemphigus vulgaris, pernicious anemia, Pityriasis lichenoides et varioliformis acuta, poems syndrome, polyarteritis nodosa, polymyalgia rheumatica, polymyositis, postmyocardial infarction syndrome, postpericardiotomy syndrome, primary biliary cirrhosis, primary immunodeficiency, primary sclerosing cholangitis, progressive inflammatory neuropathy, psoriasis, psoriatic arthritis, pure red cell aplasia, pyoderma gangrenosum, raynaud's phenomenon, reactive arthritis, relapsing polychondritis, restless leg syndrome, retroperitoneal fibrosis, rheumatic fever, rheumatoid arthritis, rheumatoid vasculitis, sarcoidosis, schnitzler syndrome, scleroderma, sjogren's syndrome, stiff person syndrome, subacute bacterial endocarditis, susac's syndrome, sydenham chorea, sympathetic ophthalmia, systemic lupus erythematosus, systemic scleroderma, thrombocytopenia, tolosa-hunt syndrome, transverse myelitis, ulcerative colitis, undifferentiated connective tissue disease, urticaria, urticarial vasculitis, vasculitis, or vitiligo.

[0446] In some embodiments, the insert sequence encodes a cytokine receptor or a functional portion thereof (e.g., a cytokine recognition domain or a signaling domain). In some embodiments the insert sequence encodes a receptor for 4-1BBL, APRIL, CD153, CD154, CD178, CD70, G-CSF, GITRL, GM-CSF, IFN-α, IFN-β, IFN-γ, IL-1RA, IL-1α, IL-1β, IL-2, IL-3, IL-4, IL-5, IL-6, IL-7, IL-9, IL-10, IL-11, IL-12, IL-13, IL-14, IL-15, IL-16, IL-17, IL-18, IL-20, IL-23, LIF, LIGHT, LT-β, M-CSF, MSP, OSM, OX40L, SCF, TALL-1, TGF-β, TGF-β1, TGF-β2, TGF-β3, TNF-α, TNF-β, TRAIL, TRANCE, TWEAK, a functional portion thereof, or a combination thereof. In some embodiments, the insert sequence encodes a common gamma chain receptor, a common beta chain receptor, an interferon receptor, a TNF family receptor, a TGF-B receptor, a functional portion thereof, or a combination thereof. In some embodiments, the insert sequence encodes Apo3, BCMA, CD114, CD115, CD116, CD117, CD118, CD120, CD120a, CD120b, CD121, CD121a, CD121b, CD122, CD123, CD124, CD126, CD127, CD130, CD131, CD132, CD212, CD213, CD213a1, CD213a13, CD213a2, CD25, CD27, CD30, CD4, CD40, CD95 (Fas), CDw119, CDw121b, CDw125, CDw131, CDw136, CDw137 (41BB), CDw210, CDw217, GITR, HVEM, IL-11R, IL-11Rα, IL-14R, IL-15R, IL-15Ra, IL-18R, IL-18Rα, IL-18Rβ, IL-20R, IL-20Rα, IL-20Rβ, IL-9R, LIFR, LTβR, OPG, OSMR, OX40, RANK, TACI, TGF-βR1, TGF-βR2, TGF-βR3, TRAILR1, TRAILR2, TRAILR3, TRAILR4, a functional portion thereof, or a combination thereof.

[0447] In some embodiments, the insert sequence encodes a chemokine, or a functional portion thereof (e.g., a portion that binds to a chemokine receptor). In some embodiments the insert sequence encodes ACT-2, AMAC-a, ATAC, ATAC, BLC, BCA-1−, BRAK−, CCL1, CCL11, CCL13, CCL14, CCL15, CCL16, CCL17, CCL18, CCL19, CCL2, CCL20, CCL21, CCL22, CCL23, CCL24, CCL25, CCL26, CCL27, CCL3, CCL4, CCL5, CCL7, CCL8, CKb-6, CKb-8, CTACK, CX3CL1, CXCL1, CXCL10, CXCL11, CXCL12, CXCL13, CXCL14, CXCL2, CXCL3, CXCL4, CXCL5, CXCL6, CXCL7, CXCL8, CXCL9, DC-CK1, ELC, ENA-78+, eotaxin, eotaxin-2, eotaxin-3, Eskine, exodus-1, exodus-2, exodus-3, fractalkine, GCP-2+, GROa, GROb, GROg, HCC-1, HCC-2, HCC-4, I-309, IL-8, ILC, IP-10−, I-TAC−, LAG-1, LARC, LCC-1, LD78α, LEC, Lkn-1, LMC, lymphotactin, lymphotactin b, MCAF, MCP-1, MCP-2, MCP-3, MCP-4, MDC, MDNCF+, MGSA-a, MGSA-b, MGSA-g, Mig−, MIP-1d, MIP-1α, MIP-1β, MIP-2a+, MIP-2b+, MIP-3, MIP-3α, MIP-3β, MIP-4, MIP-4a, MIP-5, MPIF-1, MPIF-2, NAF, NAP-1, NAP-2, oncostatin A−, PARC, PF4, PPBP+, RANTES, SCM-1a, SCM-1b, SDF-1α/β−, SLC, STCP-1, TARC, TECK, XCL1, XCL2, a functional portion thereof, or a combination thereof. In some embodiments, the insert sequence encodes CCR1, CCR2, CCR3, CCR4, CCR5, CCR6, CCR7, CCR8, CCR9, CCR10, CX3CR1, CXCR1, CXCR2, CXCR3, CXCR4, CXCR5, XCR1, XCR1, a functional portion thereof, or a combination thereof.

[0448] In some embodiments, the insert sequence encodes a transcription factor (e.g., a transcription factor that affects expression of immune genes, immune cell function, immune cell differentiation, or a combination thereof). Examples of transcription factors that can be encoded by an insert sequence of the disclosure include, but are not limited to, AP-1, Bcl6, E2A, EBF, Eomes, FoxP3, GATA3, Id2, Ikaros, IRF, IRF1, IRF2, IRF3, IRF3, IRF7, NFAT, NFkB, Pax5, PLZF, PU.1, ROR-gamma-T, STAT, STAT1, STAT2, STAT3, STAT4, STAT5, STAT5A, STAT5B, STAT6, T-bet, TCF7, and ThPOK.

[0449] In some embodiments, the insert sequence encodes a transcription factor encodes a fusion protein comprising a drug-responsive domain (e.g., a protein that can be activated or inactivated by a drug). In some embodiments, the insert sequence encodes an enzyme.

[0450] In some embodiments, the insert sequence encodes an antibody, antigen-binding protein, or a functional portion thereof. For example, an insert sequence can encode an antibody heavy chain, light chain, or a combination thereof (for example, a heavy or light chain from an IgM, IgG, IgD, IgE, IgA, IgG1, IgG2, IgG3, IgG4, IgA1 or IgA2). An insert sequence can encode an antibody with constant regions or Fc regions that are selected or modified to provide suitable antibody characteristics, for example, suitable characteristics for treating a disease or condition as disclosed herein. In some embodiments, IgG1 can be used, for example, to promote immune activation effector functions (e.g., ADCC, ADCP, CDC, ITAM signaling, cytokine induction, or a combination thereof for the treatment of a cancer). In some embodiments, IgG4 can be used, for example, in cases where antagonistic properties of the antibody in the absence of immune effector functions are desirable.

[0451] An insert sequence can encode a non-antibody product that can bind a target antigen, for example, a designed ankyrin repeat protein (DARPin) or an aptamer.

[0452] In some embodiments, an insert sequence can encode a functional portion of an antibody or an antibody-derived protein. For example, an insert sequence can encode a protein comprising one or more complementarity determining regions (CDRs). An insert sequence can encode a protein comprising one or more variable regions derived from an antibody. Non-limiting examples of functional portions of antibodies and antibody-derived proteins include Fab, Fab′, F(ab′)₂, dimers and trimers of Fab conjugates, Fv, scFv, minibodies, dia-, tria-, and tetrabodies, linear antibodies. Fab and Fab′ are antigen-binding fragments that can comprise the VH and CHI domains of the heavy chain linked to the VL and CL domains of the light chain via a disulfide bond. A F(ab′)₂ can comprise two Fab or Fab′ that are joined by disulfide bonds. A Fv can comprise the VH and VL domains held together by non-covalent interactions. A scFv (single-chain variable fragment) is a fusion protein that can comprise the VH and VL domains connected by a peptide linker. Manipulation of the orientation of the VH and VL domains and the linker length can be used to create different forms of molecules that can be monomeric, dimeric (diabody), trimeric (triabody), or tetrameric (tetrabody).

[0453] An insert sequence can encode a fusion protein comprising one or more antigen-binding regions. An insert sequence can encode a fusion protein comprising two or more antigen-binding regions. For example, an insert sequence can encode a multi-specific antigen binding protein. In some embodiments, a multi-specific antigen binding protein can bind a cancer antigen and an immune cell antigen, thereby directing the immune cell to the cancer cell. An immune cell antigen can be present on, for example, T cells, CD4+ T cells, CD8+ T cells, alpha-beta T cells, gamma-delta T cells, T regulatory cells (Tregs), cytotoxic T lymphocytes, Th1 cells, Th2 cells, Th17 cells, Th9 cells, naïve T cells, memory T cells, effector T cells, effector-memory T cells (T_{EM}), central memory T cells (T_{CM}), resident memory T cells (T_{RM}), Natural killer T cells (NKTs), tumor-infiltrating lymphocytes (TILs), Natural killer cells (NKs), Innate Lymphoid Cells (ILCs), B cells, B1 cells, B1a cells, B1b cells, B2 cells, plasma cells, B regulatory cells, antigen presenting cells (APCs), monocytes, macrophages, M1 macrophages, M2 macrophages, dendritic cells, plasmacytoid dendritic cells, neutrophils, mast cells, or a combination thereof. A multi-specific antigen-binding protein can comprise, for example, two, three, four, five, six, seven, eight, nine, ten, 11, 12, 13, 14, 15, 16, 17, 18, 19, or 20 antigen binding sites, or more. A multi-specific antigen-binding protein can comprise binding specificity for, for example, two, three, four, five, six, seven, eight, nine, or ten different target antigens.

[0454] In some embodiments, the insert sequence encodes a T cell receptor, a B cell receptor, cytokine receptor, chemokine receptor, NK cell receptor, NK T cell receptor, dendritic cell receptor, macrophage receptor, or monocyte receptor. In some embodiments, the insert sequence encodes a chimeric antigen receptor (CAR). In some embodiments, the insert sequence encodes a TCR or CAR.

[0455] In some cases, the insert sequence encodes for a CAR. In an aspect, a CAR comprises a CD3 zeta-chain (sometimes referred to as a 1st generation CAR). In another aspect, a CAR comprises a CD-3 zeta-chain and a single co-stimulatory domain (for example, CD28 or 4-1BB) (sometimes referred to as a 2nd generation CAR). In another aspect, a CAR comprises a CD-3 zeta-chain and two co-stimulatory domains (CD28/OX40 or CD28/4-1BB) (sometimes referred to as a 3rd generation CAR). Together with co-receptors such as CD8, these various signaling chains can produce downstream activation of kinase pathways, which support gene transcription and functional cellular responses.

[0456] A CAR can comprise an extracellular targeting domain, a transmembrane domain, and an intracellular signaling domain. A CAR can comprise at least a first binding moiety. Non-limiting examples of a binding moiety include, but are not limited to, a monoclonal antibody, a polyclonal antibody, a recombinant antibody, a human antibody, a humanized antibody, or a functional derivative, variant or fragment thereof, including, but not limited to, a Fab, a Fab′, a F(ab′)₂, an Fv, a single-chain Fv (scFv), minibody, a diabody, and a single-domain antibody such as a heavy chain variable domain (VH), a light chain variable domain (VL) and any combination thereof. A CAR may generally comprise a targeting domain derived from single chain antibody, hinge domain (H) or spacer, transmembrane domain (TM) providing anchorage to plasma membrane and signaling domains responsible of T-cell activation.

[0457] In an aspect, a receptor provided herein, such as a CAR, further comprises a hinge. A hinge can be located at any region of a CAR. In an aspect, a hinge is located between a binding moiety and a transmembrane region. In another aspect, a subject CAR comprises a hinge or a spacer. The hinge or the spacer can refer to a segment between the binding moiety and the transmembrane domain. In some embodiments, a hinge can be used to provide flexibility to a targeting moiety, e.g., scFv. In some embodiments, a hinge can be used to detect the expression of a CAR on the surface of a cell, for example when antibodies to detect the scFv are not functional or available. In some cases, the hinge is derived from an immunoglobulin molecule and may require optimization depending on the location of the first epitope or second epitope on the target. In some cases, a hinge may not belong to an immunoglobulin molecule but instead to another molecule such the native hinge of a CD8 alpha molecule. A CD8 alpha hinge can contain cysteine and proline residues which many play a role in the interaction of a CD8 co-receptor and MHC molecule. In some embodiments, a cysteine and proline residue can influence the performance of a CAR and may therefore be engineered to influence a CAR performance. I

[0458] In some embodiments, a hinge provided herein can be of any suitable length. In some embodiments, a hinge, for example used in a CAR, can be size tunable and can compensate, to some extent, in normalizing the orthogonal synapse distance between a CAR-expressing cell and a target cell. This topography of the immunological synapse between the CAR-expressing cell and target cell can also define a distance that cannot be functionally bridged by a CAR due to a membrane-distal epitope on a cell-surface target molecule that, even with a short hinge CAR, cannot bring the synapse distance in to an approximation for signaling. Likewise, membrane-proximal CAR target antigen epitopes have been described for which signaling outputs are only observed in the context of a long hinge CAR. A hinge disclosed herein can be tuned according to the single chain variable fragment region that can be used. In some embodiments, a hinge is from CD28, IgG1, and/or CD8α.

[0459] In some cases, a binding moiety of a CAR can be linked to an intracellular signaling domain via a transmembrane domain. A transmembrane domain can be a membrane spanning segment. A transmembrane domain of a CAR can anchor the CAR to the plasma membrane of a cell, for example an immune cell. In some embodiments, the membrane spanning segment comprises a polypeptide. The membrane spanning polypeptide linking the targeting moiety and the intracellular signaling domain of the CAR can have any suitable polypeptide sequence. In some cases, the membrane spanning polypeptide comprises a polypeptide sequence of a membrane spanning portion of an endogenous or wild-type membrane spanning protein. In some embodiments, the membrane spanning polypeptide comprises a polypeptide sequence having at least 1 (e.g., at least 2, 3, 4, 5, 6, 7, 8, 9, 10 or greater) of an amino acid substitution, deletion, and insertion compared to a membrane spanning portion of an endogenous or wild-type membrane spanning protein. In some embodiments, the membrane spanning polypeptide comprises a non-natural polypeptide sequence, such as the sequence of a polypeptide linker. The polypeptide linker may be flexible or rigid. The polypeptide linker can be structured or unstructured. In some embodiments, the membrane spanning polypeptide transmits a signal from an extracellular targeting moiety to an intracellular region. In an aspect, a subject CAR can comprise a transmembrane region that connects the targeting moiety to the intracellular region. A transmembrane region can be from or derived from an exogenous cellular transmembrane region. Various transmembrane regions are known in the art and can be from immune cell receptors. In an aspect, a transmembrane domain is from an alpha chain of a T cell receptor (TCR), beta chain of a TCR, CD3 epsilon, CD8, CD4, CD5, CD9, CD16, CD22, CD28, CD33, CD37, CD45, CD64, CD86, CD134, CD137, PD-1, and/or CD152. In some instances, a variety of human hinges can be employed as well including the human Ig (immunoglobulin) hinge. A native transmembrane portion of CD28 can be used in a CAR. In other cases, a native transmembrane portion of CD8 alpha can also be used in a subject CAR. In an aspect, the transmembrane domain is from an alpha chain of a TCR. In an aspect, the transmembrane domain is from CD8 and is CD8α. In one embodiment, the transmembrane domain may be synthetic, in which case it will comprise predominantly hydrophobic residues such as leucine and valine. Preferably a triplet of phenylalanine, tryptophan and valine will be found at each end of a synthetic transmembrane domain.

[0460] The intracellular signaling domain of a CAR of a subject fusion protein can comprise a signaling domain, or any derivative, variant, or fragment thereof, involved in immune cell signaling. The intracellular signaling domain of a CAR can induce activity of an immune cell comprising the CAR. The intracellular signaling domain can transduce the effector function signal and direct the cell to perform a specialized function. The signaling domain can comprise signaling domains of other molecules. While usually the signaling domain of another molecule can be employed in a CAR, in many cases it is not necessary to use the entire chain. In some cases, a truncated portion of the signaling domain is used in a CAR of the subject fusion protein.

[0461] In some embodiments, the intracellular signaling domain comprises multiple signaling domains involved in immune cell signaling, or any derivatives, variants, or fragments thereof. For example, the intracellular signaling domain can comprise at least 2 immune cell signaling domains, e.g., at least 2, 3, 4, 5, 7, 8, 9, or 10 immune cell signaling domains. An immune cell signaling domain can be involved in regulating primary activation of the TCR complex in either a stimulatory way or an inhibitory way. The intracellular signaling domain may be that of a TCR complex. The intracellular signaling domain of a subject CAR in a subject fusion protein can comprise a signaling domain of an Fcγ receptor (FcγR), an Fcε receptor (FcεR), an Fcα receptor (FcαR), neonatal Fc receptor (FcRn), CD3, CD3ζ, CD3γ, CD3δ, CD3ε, CD4, CD5, CD8, CD21, CD22, CD28, CD32, CD40L (CD154), CD45, CD66d, CD79a, CD79b, CD80, CD86, CD278 (also known as ICOS), CD247ζ, CD247η, DAP10, DAP12, FYN, LAT, Lck, MAPK, MHC complex, NFAT, NF-κB, PLC-γ, iC3b, C3dg, C3d, and Zap70. In some embodiments, the signaling domain includes an immunoreceptor tyrosine-based activation motif or ITAM. A signaling domain comprising an ITAM can comprise two repeats of the amino acid sequence YxxL/I separated by 6-8 amino acids, wherein each x is independently any amino acid, producing the conserved motif YxxL/Ix₍₆₋₈₎YxxL/I. A signaling domain comprising an ITAM can be modified, for example, by phosphorylation when the targeting moiety is bound to an epitope. A phosphorylated ITAM can function as a docking site for other proteins, for example proteins involved in various signaling pathways. In some embodiments, the primary signaling domain comprises a modified ITAM domain, e.g., a mutated, truncated, and/or optimized ITAM domain, which has altered (e.g., increased or decreased) activity compared to the native ITAM domain.

[0462] In some embodiments, the intracellular signaling domain of a CAR in a subject fusion protein comprises an FcγR signaling domain (e.g., ITAM). The FcγR signaling domain can be selected from FcγRI (CD64), FcγRIIA (CD32), FcγRIIB (CD32), FcγRIIIA (CD16a), and FcγRIIIB (CD16b). In some embodiments, the intracellular signaling domain comprises an FcεR signaling domain (e.g., ITAM). The FcεR signaling domain can be selected from FcεRI and FcεRII (CD23). In some embodiments, the intracellular signaling domain comprises an FcαR signaling domain (e.g., ITAM). The FcαR signaling domain can be selected from FcαRI (CD89) and Fcα/μR. In some embodiments, the intracellular signaling domain comprises a CD3ζ (signaling domain. In some embodiments, the primary signaling domain comprises an ITAM of CD3ζ.

[0463] In some embodiments, an intracellular signaling domain of a subject CAR comprises an immunoreceptor tyrosine-based inhibition motif or ITIM. A signaling domain comprising an ITIM can comprise a conserved sequence of amino acids (S/I/V/LxYxxI/V/L) that is found in the cytoplasmic tails of some inhibitory receptors of the immune system. A primary signaling domain comprising an ITIM can be modified, for example phosphorylated, by enzymes such as a Src kinase family member (e.g., Lck). Following phosphorylation, other proteins, including enzymes, can be recruited to the ITIM. These other proteins include, but are not limited to, enzymes such as the phosphotyrosine phosphatases SHP-1 and SHP-2, the inositol-phosphatase called SHIP, and proteins having one or more SH2 domains (e.g., ZAP70). A intracellular signaling domain can comprise a signaling domain (e.g., ITIM) of BTLA, CD5, CD31, CD66a, CD72, CMRF35H, DCIR, EPO-R, FcγRIIB (CD32), Fc receptor-like protein 2 (FCRL2), Fc receptor-like protein 3 (FCRL3), Fc receptor-like protein 4 (FCRL4), Fc receptor-like protein 5 (FCRL5), Fc receptor-like protein 6 (FCRL6), protein G6b (G6B), interleukin 4 receptor (IL4R), immunoglobulin superfamily receptor translocation-associated 1 (IRTA1), immunoglobulin superfamily receptor translocation-associated 2 (IRTA2), killer cell immunoglobulin-like receptor 2DL1 (KIR2DL1), killer cell immunoglobulin-like receptor 2DL2 (KIR2DL2), killer cell immunoglobulin-like receptor 2DL3 (KIR2DL3), killer cell immunoglobulin-like receptor 2DL4 (KIR2DL4), killer cell immunoglobulin-like receptor 2DL5 (KIR2DL5), killer cell immunoglobulin-like receptor 3DL1 (KIR3DL1), killer cell immunoglobulin-like receptor 3DL2 (KIR3DL2), leukocyte immunoglobulin-like receptor subfamily B member 1 (LIR1), leukocyte immunoglobulin-like receptor subfamily B member 2 (LIR2), leukocyte immunoglobulin-like receptor subfamily B member 3 (LIR3), leukocyte immunoglobulin-like receptor subfamily B member 5 (LIR5), leukocyte immunoglobulin-like receptor subfamily B member 8 (LIR8), leukocyte-associated immunoglobulin-like receptor 1 (LAIR-1), mast cell function-associated antigen (MAFA), NKG2A, natural cytotoxicity triggering receptor 2 (NKp44), NTB-A, programmed cell death protein 1 (PD-1), PILR, SIGLECL1, sialic acid binding Ig like lectin 2 (SIGLEC2 or CD22), sialic acid binding Ig like lectin 3 (SIGLEC3 or CD33), sialic acid binding Ig like lectin 5 (SIGLEC5 or CD170), sialic acid binding Ig like lectin 6 (SIGLEC6), sialic acid binding Ig like lectin 7 (SIGLEC7), sialic acid binding Ig like lectin 10 (SIGLEC10), sialic acid binding Ig like lectin 11 (SIGLEC11), sialic acid binding Ig like lectin 4 (SIGLEC4), sialic acid binding Ig like lectin 8 (SIGLEC8), sialic acid binding Ig like lectin 9 (SIGLEC9), platelet and endothelial cell adhesion molecule 1 (PECAM-1), signal regulatory protein (SIRP 2), and signaling threshold regulating transmembrane adaptor 1 (SIT). In some embodiments, the intracellular signaling domain comprises a modified ITIM domain, e.g., a mutated, truncated, and/or optimized ITIM domain, which has altered (e.g., increased or decreased) activity compared to the native ITIM domain.

[0464] In some embodiments, the intracellular signaling domain comprises at least 2 ITAM domains (e.g., at least 3, 4, 5, 6, 7, 8, 9, or 10 ITAM domains). In some embodiments, the intracellular signaling domain comprises at least 2 ITIM domains (e.g., at least 3, 4, 5, 6, 7, 8, 9, or 10 ITIM domains) (e.g., at least 2 primary signaling domains). In some embodiments, the intracellular signaling domain comprises both ITAM and ITIM domains. In an aspect, an intracellular signaling domain of subject CAR is from an Fcγ receptor (FcγR), an Fcε receptor (FcεR), an Fcα receptor (FcαR), neonatal Fc receptor (FcRn), CD3, CD3ζ, CD3γ, CD3δ, CD3ε, CD4, CD5, CD8, CD21, CD22, CD28, CD32, CD40L (CD154), CD45, CD66d, CD79a, CD79b, CD80, CD86, CD278 (also known as ICOS), CD247ζ, CD247η, DAP10, DAP12, FYN, LAT, Lck, MAPK, MHC complex, NFAT, NF-κB, PLC-γ, iC3b, C3dg, C3d, and Zap70. In another aspect, the intracellular signaling domain of a subject CAR is from CD3, CD3ζ, CD3γ, CD3δ, and/or CD3ε.

[0465] In some cases, a fusion protein provided herein comprises an intracellular signaling domain that comprises a co-stimulatory domain. In an aspect, a costimulatory domain can be part of a subject CAR of a fusion protein provided herein. In some embodiments, a co-stimulatory domain, for example from a cellular co-stimulatory molecule, can provide co-stimulatory signals for immune cell signaling, such as signaling from ITAM and/or ITIM domains, e.g., for the activation and/or deactivation of immune cell activity. In some embodiments, a costimulatory domain is operable to regulate a proliferative and/or survival signal in the immune cell. In some embodiments, a co-stimulatory signaling domain comprises a signaling domain of a MHC class I protein, MHC class II protein, TNF receptor protein, immunoglobulin-like protein, cytokine receptor, integrin, signaling lymphocytic activation molecule (SLAM protein), activating NK cell receptor, BTLA, or a Toll ligand receptor. In some embodiments, the costimulatory domain comprises a signaling domain of a molecule selected from the group consisting of: 2B4/CD244/SLAMF4, 4-1BB/TNFSF9/CD137, B7-1/CD80, B7-2/CD86, B7-H1/PD-L1, B7-H2, B7-H3, B7-H4, B7-H6, B7-H7, BAFF R/TNFRSF13C, BAFF/BLyS/TNFSF13B, BLAME/SLAMF8, BTLA/CD272, CD100 (SEMA4D), CD103, CD11a, CD11b, CD11c, CD11d, CD150, CD160 (BY55), CD18, CD19, CD2, CD200, CD229/SLAMF3, CD27 Ligand/TNFSF7, CD27/TNFRSF7, CD28, CD29, CD2F-10/SLAMF9, CD30 Ligand/TNFSF8, CD30/TNFRSF8, CD300a/LMIR1, CD4, CD40 Ligand/TNFSF5, CD40/TNFRSF5, CD48/SLAMF2, CD49a, CD49D, CD49f, CD5, CD53, CD58/LFA-3, CD69, CD7, CD8α, CD8β, CD82/Kai-1, CD84/SLAMF5, CD90/Thy1, CD96, CDS, CEACAM1, CRACC/SLAMF7, CRTAM, CTLA-4, DAP12, Dectin-1/CLEC7A, DNAM1 (CD226), DPPIV/CD26, DR3/TNFRSF25, EphB6, GADS, Gi24/VISTA/B7-H5, GITR Ligand/TNFSF18, GITR/TNFRSF18, HLA Class I, HLA-DR, HVEM/TNFRSF14, IA4, ICAM-1, ICOS/CD278, Ikaros, IL2R β, IL2R γ, IL7R α, Integrin α4/CD49d, Integrin α4β1, Integrin α4β7/LPAM-1, IPO-3, ITGA4, ITGA6, ITGAD, ITGAE, ITGAL, ITGAM, ITGAX, ITGB1, ITGB2, ITGB7, KIRDS2, LAG-3, LAT, LIGHT/TNFSF14, LTBR, Ly108, Ly9 (CD229), lymphocyte function associated antigen-1 (LFA-1), Lymphotoxin-α/TNF-β, NKG2C, NKG2D, NKp30, NKp44, NKp46, NKp80 (KLRF1), NTB-A/SLAMF6, OX40 Ligand/TNFSF4, OX40/TNFRSF4, PAG/Cbp, PD-1, PDCD6, PD-L2/B7-DC, PSGL1, RELT/TNFRSF19L, SELPLG (CD162), SLAM (SLAMF1), SLAM/CD150, SLAMF4 (CD244), SLAMF6 (NTB-A), SLAMF7, SLP-76, TACI/TNFRSF13B, TCL1A, TCL1B, TIM-1/KIM-1/HAVCR, TIM-4, TL1A/TNFSF15, TNF RII/TNFRSF1B, TNF-α, TRANCE/RANKL, TSLP, TSLP R, VLA1, and VLA-6. In some embodiments, the intracellular signaling domain comprises multiple costimulatory domains, for example at least two, e.g., at least 3, 4, or 5 costimulatory domains. In an aspect, a receptor provided herein, such as a CAR, comprises at least 2 or 3 co-stimulatory domains. In an aspect, a receptor comprises at least 2 costimulatory domains, and wherein the at least 2 costimulatory domains are CD28 and CD137. In an aspect, the receptor comprises at least 3 costimulatory domains, and wherein the at least 3 costimulatory domains are CD28, CD137, and OX40L. Co-stimulatory signaling regions may provide a signal synergistic with the primary effector activation signal and can complete the requirements for activation of a T cell. In some embodiments, the addition of co-stimulatory domains to the CAR can enhance the efficacy and persistence of the immune cells provided herein.

[0466] In some cases, the insert sequence encodes a TCR or functional fragment thereof. A TCR refers to a molecule on the surface of a T cell or T lymphocyte that is responsible for recognizing an antigen. A TCR is a heterodimer which can be composed of two different protein chains. In some embodiments, the TCR of the present disclosure consists of an alpha (α) chain and a beta (β) chain and is referred as αβ TCR. αβ TCR recognizes antigenic peptides degraded from protein bound to major histocompatibility complex molecules (MHC) at the cell surface. In some embodiments, the TCR of the present disclosure consists of a gamma (γ) and a delta (δ) chain and is referred as γδ TCR. γδ TCR recognizes peptide and non-peptide antigens in a MHC-independent manner. γδ T cells have shown to play a prominent role in recognizing lipid antigens. In particular, the γ chain of TCR includes but is not limited to Vγ2, Vγ3, Vγ4, Vγ5, Vγ8, Vγ9, Vγ10, a functional variant thereof, and a combination thereof; and the 6 chain of TCR includes but is not limited to δ1, δ2, δ3, a functional variant thereof, and a combination thereof. In some embodiments, the γδ TCR may be Vγ2/Vδ1TCR, Vγ2/Vδ2 TCR, Vγ2/Vδ3 TCR, Vγ3/Vδ1 TCR, Vγ3/Vδ2 TCR, Vγ3/Vδ3 TCR, Vγ4/Vδ1 TCR, Vγ4/Vδ2 TCR, Vγ4/Vδ3 TCR, Vγ5/Vδ1 TCR, Vγ5/Vδ2 TCR, Vγ5/Vδ3 TCR, Vγ8/Vδ1 TCR, Vγ8/Vδ2 TCR, Vγ8/Vδ3 TCR, Vγ9/Vδ1 TCR, Vγ9/Vδ2 TCR, Vγ9/Vδ3 TCR, Vγ10/Vδ1 TCR, Vγ10/Vδ2 TCR, and/or Vγ10/Vδ3 TCR. In some examples, the γδ TCR may be Vγ9/Vδ2 TCR, Vγ10/Vδ2 TCR, and/or Vγ2/Vδ2 TCR.

[0467] In some cases, an insert sequence encodes for a TCR that comprises a TCR previously identified. In some cases, the TCR can be identified using whole-exomic sequencing. For example, a TCR can target a neoantigen or neoepitope that is identified by whole-exomic sequencing of a target cell. Alternatively, the TCR can be identified from autologous, allogenic, or xenogeneic repertoires. Autologous and allogeneic identification can entail a multistep process. In both autologous and allogeneic identification, dendritic cells (DCs) can be generated from CD14-selected monocytes and, after maturation, pulsed or transfected with a specific peptide. Peptide-pulsed DCs can be used to stimulate autologous or allogeneic immune cells, such as T cells. Single-cell peptide-specific T cell clones can be isolated from these peptide-pulsed T cell lines by limiting dilution. Subject TCRs of interest can be identified and isolated. Alpha, beta, gamma, and delta chains of a TCR of interest can be cloned, codon optimized, and encoded into a vector, for instance a lentiviral vector. In some embodiments, portions of the TCR can be replaced. For example, constant regions of a human TCR can be replaced with the corresponding murine regions. Replacement of human constant regions with corresponding murine regions can be performed to increase TCR stability. The TCR can also be identified with high or supraphysiologic avidity ex vivo. In some cases, a method of identifying a TCR can include immunizing transgenic mice that express the human leukocyte antigen (HLA) system with human tumor proteins to generate T cells expressing TCRs against human antigens (see e.g., Stanislawski et al., Circumventing tolerance to a human MDM2-derived tumor antigen by TCR gene transfer, Nature Immunology 2, 962-970 (2001)). An alternative approach can be allogeneic TCR gene transfer, in which tumor-specific T cells are isolated from a subject experiencing tumor remission and reactive TCR sequences can be transferred to T cells from another subject that shares the disease but may be non-responsive (de Witte, M. A., et al., Targeting self-antigens through allogeneic TCR gene transfer, Blood 108, 870-877 (2006)). In some cases, in vitro technologies can be employed to alter a sequence of a TCR, enhancing their tumor-killing activity by increasing the strength of an interaction (avidity) of a weakly reactive tumor-specific TCR with target antigen (Schmid, D. A., et al., Evidence for a TCR affinity threshold delimiting maximal CD8 T cell function. J. Immunol. 184, 4936-4946 (2010)).

[0468] In some embodiments, the insert sequence encodes a protein expressed on an immune cell that specifically binds an antigen expressed on a cancer cell. In some embodiments, the insert sequence encodes a protein expressed on an immune cell that specifically binds a neoantigen expressed on a cancer cell. In some embodiments, the insert sequence encodes a protein expressed on an immune cell that specifically binds a cancer associated antigen. In some embodiments, the insert sequence encodes a protein expressed on an immune cell that specifically binds an antigen expressed on a cancer cell. In some embodiments, the insert sequence encodes a protein expressed on an immune cell that specifically binds an antigen associated with an autoimmune disease. In some embodiments, the insert sequence encodes a protein expressed on an immune cell that specifically binds an antigen expressed on a pathogen (e.g., a microorganism, e.g., a virus, bacterium, parasite, fungus, or yeast).

[0469] In some embodiments, the insert sequence encodes a protein expressed on an immune cell and specifically binds carcinoembryonic antigen, alphafetoprotein, CA-125, MUC-1, epithelial tumor antigen, melanoma-associated antigen, mutated p53, mutated ras, HER2/Neu, ERBB2, folate binding protein, HIV-1 envelope glycoprotein gp120, HIV-1 envelope glycoprotein gp41, GD2, c-Met, mesothelin, GD3, HERV-K, IL-11Ralpha, kappa chain, lambda chain, CSPG4, ERBB2, EGFRvIII, VEGFR2, carbonic anhydrase IX, alphafetoprotein (AFP), α-actinin-4, ART-4, A1847, Ba 733, BAGE, BCMA, BrE3-antigen, CA125, CAMEL, CAP-1, CASP-8/m, CCL19, CCL21, CD1, CD1a, CD2, CD3, CD4, CD5, CD8, CD11A, CD14, CD15, CD16, CD18, CD19, CD20, CD21, CD22, CD23, CD25, CD29, CD30, CD32b, CD33, CD37, CD3ε, CD40, CD40L, CD44, CD45, CD46, CD52, CD54, CD55, CD56, CD59, CD64, CD66a-e, CD67, CD70, CD7OL, CD74, CD79a, CD80, CD83, CD95, CD126, CD123, CD132, CD133, CD138, CD147, CD154, CDC27, CDK-4/m, CDKN2A, CTLA-4, CXCR4, CXCR7, CXCL12, HIF-1α, colon-specific antigen-p (CSAp), CEA (CEACAM5), CEACAM6, c-Met, DAM, EGFR, EGFRvIII, EGP-1 (TROP-2), EGP-2, ELF2-M, Ep-CAM, fibroblast growth factor (FGF), Flt-1, Flt-3, folate receptor, G250 antigen, GAGE, gp100, GRO-β, HLA-DR, HM1.24, human chorionic gonadotropin (HCG), HER2/neu, HMGB-1, hypoxia inducible factor (HIF-1), HSP70-2 M, HST-2, Ia, IGF-1R, IFN-γ, IFN-α, IFN-β, IFN-λ, IL-4R, IL-6R, IL-13R, IL-15R, IL-17R, IL-18R, IL-2, IL-6, IL-8, IL-12, IL-15, IL-17, IL-18, IL-23, IL-25, insulin-like growth factor-1 (IGF-1), KS1-4, Le-Y, LDR/FUT, macrophage migration inhibitory factor (MIF), MAGE, MAGE-3, MART-1, MART-2, NY-ESO-1, TRAG-3, CRP, MDA-MB-231, MCP-1, MIP-1A, MIP-1B, MUC1, MUC2, MUC3, MUC4, MUC5ac, MUC13, MUC16, MUM-1/2, MUM-3, Mesothelin, NCA66, NCA95, NCA90, pancreatic cancer mucin, PD1, PD-1 receptor, placental growth factor, p53, PLAGL2, prostatic acid phosphatase, PSA, PRAME, PSMA, P1GF, ILGF, ILGF-1R, IL-6, IL-25, RS5, RANTES, T101, SAGE, 5100, survivin, survivin-2B, TAC, TAG-72, tenascin, TRAIL receptors, TNF-α, Tn antigen, Thomson-Friedenreich antigens, tumor necrosis antigens, VEGFR, ED-B fibronectin, WT-1, 17-1A-antigen, complement factor C3, complement factor C3a, complement factor C3b, complement factor C5a, complement factor C5, 707-AP, a biotinylated molecule, a-Actinin-4, abl-bcr alb-b3 (b2a2), abl-bcr alb-b4 (b3a2), adipophilin, AFP, AIM-2, Annexin II, ART-4, BAGE, b-Catenin, bcr-abl, bcr-abl p190 (e1a2), bcr-abl p210 (b2a2), bcr-abl p210 (b3a2), BING-4, CAG-3, CAIX, CAMEL, Caspase-8, CD171, CD19, CD20, CD22, CD23, CD24, CD30, CD33, CD3ε, CD44v7/8, CDC27, CDK-4, CEA, CLCA2, Cyp-B, DAM-10, DAM-6, DEK-CAN, EGFRvIII, EGP-2, EGP-40, ELF2, Ep-CAM, EphA2, EphA3, erb-B2, erb-B3, erb-B4, ES-ESO-1a, ETV6/AML, FBP, fetal acetylcholine receptor, FGF-5, FN, G250, GAGE-1, GAGE-2, GAGE-3, GAGE-4, GAGE-5, GAGE-6, GAGE-7B, GAGE-8, GD2, GD3, GnT-V, Gp100, gp75, Her-2, HLA-A*0201-R1701, HMW-MAA, HSP70-2 M, HST-2 (FGF6), HST-2/neu, hTERT, iCE, IL-11Rα, IL-13Rα2, KDR, KIAA0205, K-RAS, L1-cell adhesion molecule, LAGE-1, LDLR/FUT, Lewis Y, MAGE-1, MAGE-10, MAGE-12, MAGE-2, MAGE-3, MAGE-4, MAGE-6, MAGE-A1, MAGE-A2, MAGE-A3, MAGE-A6, MAGE-B1, MAGE-B2, Malic enzyme, Mammaglobin-A, MART-1/Melan-A, MART-2, MC1R, M-CSF, mesothelin, MUC1, MUC16, MUC2, MUM-1, MUM-2, MUM-3, Myosin, NA88-A, Neo-PAP, NKG2D, NPM/ALK, N-RAS, NY-ESO-1, OA1, OGT, oncofetal antigen (h5T4), OS-9, P polypeptide, P15, P53, PRAME, PSA, PSCA, PSMA, PTPRK, RAGE, ROR1, RU1, RU2, SART-1, SART-2, SART-3, SOX10, SSX-2, Survivin, Survivin-2B, SYT/SSX, TAG-72, TEL/AML1, TGFaRII, TGFbRII, TP1, TRAG-3, TRG, TRP-1, TRP-2, TRP-2/INT2, TRP-2-6b, Tyrosinase, VEGF-R2, WT1, α-folate receptor, and κ-light chain.

[0470] In some cases, a cellular receptor provided in an insert can be capable of binding to a neoantigen and/or neoepitope. Neoantigens and neoepitopes generally refer to tumor-specific mutations that in some cases trigger an antitumor T cell response. For example, these endogenous mutations can be identified using a whole-exomic-sequencing approach. Tran E, et al., “Cancer immunotherapy based on mutation-specific CD4+ T cells in a patient with epithelial cancer,” Science 344: 641-644 (2014). An antigen binding domain, for example, that of a subject CAR or a modified TCR complex can exhibit specific binding to a tumor-specific neo-antigen. Neoantigens bound by antigen binding domains the modified TCR complex can be expressed on a target cell, and for example, are neoantigens and neoepitopes encoded by mutations in any endogenous gene. In some cases, the two or more antigen binding domains bind a neoantigen or neoepitope encoded by a mutated gene. The gene can be selected from the group consisting of: ABL1, ACOl 1997, ACVR2A, AFP, AKT1, ALK, ALPPL2, ANAPC1, APC, ARID1A, AR, AR-v7, ASCL2, β2 M, BRAF, BTK, C15ORF40, CDH1, CLDN6, CNOT1, CT45A5, CTAG1B, DCT, DKK4, EEF1B2, EEF1DP3, EGFR, EIF2B3, env, EPHB2, ERBB3, ESR1, ESRP1, FAM11 IB, FGFR3, FRG1B, GAGE1, GAGE 10, GATA3, GBP3, HER2, IDH1, JAK1, KIT, KRAS, LMAN1, MABEB 16, MAGEA1, MAGEA10, MAGEA4, MAGEA8, MAGEB 17, MAGEB4, MAGEC1, MEK, MLANA, MLL2, MMP13, MSH3, MSH6, MYC, NDUFC2, NRAS, NY-ESO, PAGE2, PAGE5, PDGFRa, PIK3CA, PMEL, pol protein, POLE, PTEN, RAC1, RBM27, RNF43, RPL22, RUNX1, SEC31A, SEC63, SF3B1, SLC35F5, SLC45A2, SMAP1, SMAP1, SPOP, TFAM, TGFBR2, THAP5, TP53, TTK, TYR, UBR5, VHL, and XPOT.

[0471] In some embodiments, a cellular receptor provided in an insert can bind an antigen or epitope that may be present on a stroma. Stroma generally refers to tissue which, among other things, provides connective and functional support of a biological cell, tissue, or organ. A stroma can be that of the tumor microenvironment. The epitope may be present on a stromal antigen. Such an antigen can be on the stroma of the tumor microenvironment. Neoantigens and neoepitopes, for example, can be present on tumor endothelial cells, tumor vasculature, tumor fibroblasts, tumor pericytes, tumor stroma, and/or tumor mesenchymal cells. Example antigens include, but are not limited to, CD34, MCSP, FAP, CD31, PCNA, CD117, CD40, MMP4, and Tenascin.

### Homology Arms

[0472] A polynucleic acid construct can comprise a homology arm or homology arms. A homology arm can comprise a sequence with a degree of homology to a sequence in the genome of the immune cell to be edited, for example, to direct the repair of a double stranded break in the immune cell genome using the polynucleic acid construct or a part thereof as a repair template (e.g., repair via a pathway comprising single strand annealing, homology-mediated end joining, microhomology-mediated end joining, alternative end joining, homology-directed repair, homologous recombination, or a combination thereof). A homology arm can target a polynucleic acid construct or a part thereof to a desired site in the immune cell genome, e.g., a site adjacent to a double stranded break. A polynucleic acid construct can comprise one homology arm. A polynucleic acid construct of the disclosure can comprise two homology arms. Two homology arms in a polynucleic acid construct can flank a sequence to be inserted into the immune cell genome (e.g., a transgene). Two homology arms in a polynucleic acid construct can be directly adjacent to each other (e.g., for generating a deletion in the immune cell genome). A polynucleic acid construct of the disclosure can comprise three or more homology arms.

[0473] Homology arms of the disclosure can be single stranded DNA (ssDNA). In other aspects, homology arms are double stranded (dsDNA). In some aspects, a homology arm or homology arms are 100 nt and can flank each side of a donor insert sequence. In some aspects, a homology arm or homology arms are ssDN A of about 50, 51, 52, 53, 54, 55, 56, 57, 58, 59, 60, 61, 62, 63, 64, 65, 66, 67, 68, 69, 70, 71, 72, 73, 74, 75, 76, 77, 78, 79, 80, 81, 82, 83, 84, 85, 86, 87, 88, 89, 90, 91, 92, 93, 94, 95, 96, 97, 98, 99, 100, 105, 110, 115, 120, 125, 130, 135, 140, 145, 150, 155, 160, 165, 170, 175, 180, 185, 190, 195, or 200 nt and can flank each side of a donor insert sequence. In some aspects, a homology arm or homology arms are ssDNA of about 100 nt and can flank each side of a donor insert sequence.

[0474] A homology arm can comprise a sequence with about or at least about 60%, 61%, 62%, 63%, 64%, 65%, 66%, 67%, 68%, 69%, 70%, 71%, 72%, 73%, 74%, 75%, 76%, 77%, 78%, 79%, 80%, 81%, 82%, 83%, 84%, 85%, 86%, 87%, 88%, 89%9, 90%, 91%, 92%, 93%, 94%, 95%, 95.5%, 96%, 96.5%, 97%, 97.5%, 98%, 98.5%, 99%, 99.1%, 99.1%, 99.3%, 99.4%, 99.5%, 99.6%, 99.7%, 99.8%, 99.9%, 99.95%, 99.99%, or 100% sequence identity with a sequence in the genome of the immune cell to be edited. A homology arm can comprise a sequence with a degree of homology that is sufficient to allow the polynucleic acid construct or a part thereof to be used as a repair template for a double-stranded break in the immune cell genome. In some embodiments, a homology arm can contain one or more nucleotides that do not match the homologous sequence in the immune cell genome (e.g., for correction of one or more single nucleotide polymorphisms (SNPs) or for introduction of one or more SNPs). In some embodiments, two or more homology arms in a polynucleic acid construct contain the same degree of homology to corresponding sites in the immune cell genome. In some embodiments, two or more homology arms in a polynucleic acid construct contain different degrees of homology to corresponding sites in the immune cell genome. A homology arm can contain a nucleic acid sequence that is homologous to nucleotides in a gene, nucleotides in an open reading frame, nucleotides in a non-coding region or a combination thereof.

[0475] In some embodiments, a homology arm is about 24 nucleotides in length. In some embodiments, a homology arm is about 48 nucleotides in length. A homology arm can be, for example, about 3, 4, 5, 6, 7, 8, 9, 10, 11, 12, 13, 14, 15, 16, 17, 18, 19, 20, 21, 22, 23, 24, 25, 26, 27, 28, 29, 30, 31, 32, 33, 34, 35, 36, 37, 38, 39, 40, 41, 42, 43, 44, 45, 46, 47, 48, 49, 50, 51, 52, 53, 54, 55, 56, 57, 58, 59, 60, 61, 62, 63, 64, 65, 66, 67, 68, 69, 70, 71, 72, 73, 74, 75, 76, 77, 78, 79, 80, 81, 82, 83, 84, 85, 86, 87, 88, 89, 90, 91, 92, 93, 94, 95, 96, 97, 98, 99, 100, 105, 110, 115, 120, 125, 130, 135, 140, 145, 150, 155, 160, 165, 170, 175, 180, 185, 190, 195, 200, 200, 210, 220, 230, 240, 250, 260, 270, 280, 290, 300, 310, 320, 330, 340, 350, 360, 370, 380, 390, 400, 410, 420, 430, 440, 450, 460, 470, 480, 490, 500, 520, 540, 560, 580, 600, 620, 640, 660, 680, 700, 720, 740, 760, 780, 800, 850, 900, 950, 1000, 1050, 1100, 1150, 1200, 1250, 1300, 1350, 1400, 1450, 1500, 1550, 1600, 1650, 1700, 1750, 1800, 1850, 1900, 1950, or 2000 nucleotides in length.

[0476] In some embodiments, a homology arm of the disclosure is at most 3, 4, 5, 6, 7, 8, 9, 10, 11, 12, 13, 14, 15, 16, 17, 18, 19, 20, 21, 22, 23, 24, 25, 26, 27, 28, 29, 30, 31, 32, 33, 34, 35, 36, 37, 38, 39, 40, 41, 42, 43, 44, 45, 46, 47, 48, 49, 50, 51, 52, 53, 54, 55, 56, 57, 58, 59, 60, 61, 62, 63, 64, 65, 66, 67, 68, 69, 70, 71, 72, 73, 74, 75, 76, 77, 78, 79, 80, 81, 82, 83, 84, 85, 86, 87, 88, 89, 90, 91, 92, 93, 94, 95, 96, 97, 98, 99, 100, 105, 110, 115, 120, 125, 130, 135, 140, 145, 150, 155, 160, 165, 170, 175, 180, 185, 190, 195, 200, 200, 210, 220, 230, 240, 250, 260, 270, 280, 290, 300, 310, 320, 330, 340, 350, 360, 370, 380, 390, 400, 410, 420, 430, 440, 450, 460, 470, 480, 490, 500, 520, 540, 560, 580, 600, 620, 640, 660, 680, 700, 720, 740, 760, 780, 800, 850, 900, 950, 1000, 1050, 1100, 1150, 1200, 1250, 1300, 1350, 1400, 1450, 1500, 1550, 1600, 1650, 1700, 1750, 1800, 1850, 1900, 1950, or 2000 nucleotides in length.

[0477] In some embodiments, a homology arm of the disclosure is at least 3, 4, 5, 6, 7, 8, 9, 10, 11, 12, 13, 14, 15, 16, 17, 18, 19, 20, 21, 22, 23, 24, 25, 26, 27, 28, 29, 30, 31, 32, 33, 34, 35, 36, 37, 38, 39, 40, 41, 42, 43, 44, 45, 46, 47, 48, 49, 50, 51, 52, 53, 54, 55, 56, 57, 58, 59, 60, 61, 62, 63, 64, 65, 66, 67, 68, 69, 70, 71, 72, 73, 74, 75, 76, 77, 78, 79, 80, 81, 82, 83, 84, 85, 86, 87, 88, 89, 90, 91, 92, 93, 94, 95, 96, 97, 98, 99, 100, 105, 110, 115, 120, 125, 130, 135, 140, 145, 150, 155, 160, 165, 170, 175, 180, 185, 190, 195, 200, 200, 210, 220, 230, 240, 250, 260, 270, 280, 290, 300, 310, 320, 330, 340, 350, 360, 370, 380, 390, 400, 410, 420, 430, 440, 450, 460, 470, 480, 490, 500, 520, 540, 560, 580, 600, 620, 640, 660, 680, 700, 720, 740, 760, 780, 800, 850, 900, 950, 1000, 1050, 1100, 1150, 1200, 1250, 1300, 1350, 1400, 1450, 1500, 1550, 1600, 1650, 1700, 1750, 1800, 1850, 1900, 1950, or 2000 nucleotides in length.

[0478] A homology arm can be a short homology arm. A short homology arm can be, for example, at most 3, 4, 5, 6, 7, 8, 9, 10, 11, 12, 13, 14, 15, 16, 17, 18, 19, 20, 21, 22, 23, 24, 25, 26, 27, 28, 29, 30, 31, 32, 33, 34, 35, 36, 37, 38, 39, 40, 41, 42, 43, 44, 45, 46, 47, 48, 49, 50, 51, 52, 53, 54, 55, 56, 57, 58, 59, 60, 61, 62, 63, 64, 65, 66, 67, 68, 69, 70, 71, 72, 73, 74, 75, 76, 77, 78, 79, 80, 81, 82, 83, 84, 85, 86, 87, 88, 89, 90, 91, 92, 93, 94, 95, 96, 97, 98, 99, 100, 105, 110, 115, 120, 125, 130, 135, 140, 145, 150, 155, 160, 165, 170, 175, 180, 185, 190, 195, 200, 200, 210, 220, 230, 240, 250, 260, 270, 280, 290, 300, 310, 320, 330, 340, 350, 360, 370, 380, 390, or 400 nucleotides in length.

[0479] A short homology arm can be, for example, about 3-400, 5-300, 5-200, 5-100, 5-90, 5-80, 5-70, 5-60, 5-50, 5-49, 5-48, 5-47, 5-46, 5-45, 5-44, 5-43, 5-42, 5-41, 5-40, 5-39, 5-38, 5-37, 5-36, 5-35, 5-34, 5-33, 5-32, 5-31, 5-30, 5-29, 5-28, 5-27, 5-26, 5-25, 5-24, 5-23, 5-22, 5-21, 5-20, 5-19, 5-18, 5-7, 5-16, 5-15, 5-14, 5-13, 5-12, 5-11, 5-10, 10-50, 10-49, 10-48, 10-47, 10-46, 10-45, 10-44, 10-43, 10-42, 10-41, 10-40, 10-39, 10-38, 10-37, 10-36, 10-35, 10-34, 10-33, 10-32, 10-31, 10-30, 10-29, 10-28, 10-27, 10-26, 10-25, 10-24, 10-23, 10-22, 10-21, 10-20, 10-19, 10-18, 10-17, 10-16, 10-15, 15-50, 15-49, 15-48, 15-47, 15-46, 15-45, 15-44, 15-43, 15-42, 15-41, 15-40, 15-39, 15-38, 15-37, 15-36, 15-35, 15-34, 15-33, 15-32, 15-31, 15-30, 15-29, 15-28, 15-27, 15-26, 15-25, 15-24, 15-23, 15-22, 15-21, 15-20, 20-50, 20-49, 20-48, 20-47, 20-46, 20-45, 20-44, 20-43, 20-42, 20-41, 20-40, 20-39, 20-38, 20-37, 20-36, 20-35, 20-34, 20-33, 20-32, 20-31, 20-30, 20-29, 20-28, 20-27, 20-26, 20-25, 20-24, 24-50, 24-49, 24-48, 24-47, 24-46, 24-45, 24-44, 24-43, 24-42, 24-41, 24-40, 24-39, 24-38, 24-37, 24-36, 24-35, 24-34, 24-33, 24-32, 24-31, 24-30, 24-29, or 24-28 nucleotides in length.

[0480] A homology arm can be a long homology arm. A long homology arm can be, for example, at least 400, 410, 420, 430, 440, 450, 460, 470, 480, 490, 500, 520, 540, 560, 580, 600, 620, 640, 660, 680, 700, 720, 740, 760, 780, 800, 850, 900, 950, 1000, 1050, 1100, 1150, 1200, 1250, 1300, 1350, 1400, 1450, or 1500 nucleotides in length.

[0481] In some embodiments, a homology arm contains a number of nucleotides that is a multiple of three. In some embodiments, a homology arm contains a number of nucleotides that is not a multiple of three. In some embodiments, a homology arm contains a number of nucleotides that is a multiple of four. In some embodiments, a homology arm contains a number of nucleotides that is not a multiple of four.

[0482] A polynucleic acid construct of the disclosure can comprise, for example, 1, 2, 3, 4, 5, 6, 7, 8, 9, 10, 11, 12, 13, 14, 15, 16, 17, 18, 19, 20 homology arms, or more. In some embodiments, two or more homology arms in a polynucleic acid construct are the same length. In some embodiments, two or more homology arms in a polynucleic acid construct are different lengths.

[0483] In some embodiments, the homology arm comprises a nucleotide sequence that is at least about 70%, 75%, 80%, 85%, 90%, 91%, 92%, 93%, 94%, 95%, 96%, 97%, 98%, 99%, or 100% complementary to a genomic locus adjacent to a target site. In some embodiments, the homology arm comprises a nucleotide sequence that is from about 70%-100%, 80%-100%, 90%-100, 95%-100%, 96%-100%, 97%-100%, 98%-100%, 99%-100% complementary to a genomic locus adjacent to a target site. In some embodiments, the homology arm comprises a nucleotide sequence that is about 70%, 75%, 80%, 85%, 90%, 91%, 92%, 93%, 94%, 95%, 96%, 97%, 98%, 99%, or 100% complementary to a genomic locus adjacent to a target site.

[0484] In some embodiments, homology arms can comprise a sequence that is about 70%, 75%, 80%, 85%, 90%, 91%, 92%, 93%, 94%, 95%, 96%, 97%, 98%, 99%, or 100% complementary to a gene from Table 1, an immune checkpoint gene, a safe harbor gene, or any combination thereof.

### Cleavage Sites

[0485] In some embodiments, the one or more (e.g., two) homology arms in a polynucleic acid construct that flank an insert sequence are flanked by a cleavage site. For example, in some embodiments, a polynucleic acid construct comprises two homology arms, one on each end of an insert sequence (e.g., transgene), and each homology arm is flanked by a cleavage site. For example, from 5′ to 3′ the polynucleic acid can comprise a first cleavage site, a first homology arm, an insert sequence (e.g., a transgene), a second homology arm, and a second cleavage site. In some embodiments, a polynucleic acid construct contains one homology arm. For example, a polynucleic acid can comprise from 5′ to 3′ a cleavage site, a homology arm, an insert sequence (e.g., a transgene); or an insert sequence, a homology arm, and a cleavage site; or a cleavage site, an insert sequence, homology arm, and a cleavage site; or a cleavage site, a homology arm, an insert sequence, and a cleavage site.

[0486] In some embodiments, said cleavage site is adjacent to a targeted sequence recognized by a guide RNA (gRNA). In some embodiments, the targeted sequence is recognized by a gRNA (e.g., a sgRNA) that directs an endonuclease to the cleavage site. In some embodiments, said endonuclease is a CRISPR system endonuclease (e.g., a Cas endonuclease), TALEN endonuclease, or zinc finger endonuclease. In some embodiments, said endonuclease is an endonuclease described herein.

[0487] In some embodiments, the cleavage site is a CRISPR system cleavage site. In some embodiments, the CRISPR system cleavage site comprises a PAM motif and a sequence at least 80%, 85%, 90%, 95%, 96%, 97%, 98%, 99%, or 100% complementary to a gRNA. In some embodiments, said gRNA binds to said sequence.

[0488] In some embodiments, the CRISPR system cleavage site comprises a PAM motif. In some embodiments, the polynucleic acid construct comprises a spacer between the PAM motif and the homology arm. In some embodiments, the spacer is at least 1, 2, 3, 4, 5, 6, 7, 8, 9, or 10 bp. In some embodiments, the spacer is from about 1-10 bp, 1-9 bp, 1-8 bp, 1-7 bp, 1-6 bp, 1-5 bp, 1-4 bp, 1-3 bp, or 1-2 bp. In some embodiments, the spacer is about 1, 2, 3, 4, 5, 6, 7, 8, 9, or 10 bp. In some embodiments, the spacer is about 3 bp. In some embodiments, the spacer is at least 1, 2, 3, 4, 5, 6, 7, 8, 9, or 10 nucleotides. In some embodiments, the spacer is from about 1-10 nucleotides, 1-9 nucleotides, 1-8 nucleotides, 1-7 nucleotides, 1-6 nucleotides, 1-5 nucleotides, 1-4 nucleotides, 1-3 nucleotides, or 1-2 nucleotides. In some embodiments, the spacer is about 1, 2, 3, 4, 5, 6, 7, 8, 9, or 10 nucleotides. In some embodiments, the spacer is about 3 nucleotides.

### Promoters and Enhancers

[0489] In some embodiments, said polynucleic acid construct comprises a promoter. A suitable promoter can be selected by a person of ordinary skill in the art. Expression of a transgene can be controlled by at least one promoter. Exemplary promoters include, but are not limited to, CMV, U6, MND, PKG, MND, or EF1a.

[0490] The promoter can be a ubiquitous, constitutive (unregulated promoter that allows for continual transcription of an associated gene), tissue-specific promoter or an inducible promoter. Exemplary ubiquitous promoters include, but are not limited to, a CAGGS promoter, an hCMV promoter, a PGK promoter, an SV40 promoter, or a ROSA26 promoter.

[0491] The promoter can be endogenous or exogenous. For example, one or more transgenes can be inserted adjacent or near to an endogenous or exogenous ROSA26 promoter. Further, a promoter can be specific to a T cell. For example, one or more transgenes can be inserted adjacent or near to a porcine ROSA26 promoter.

[0492] Tissue specific promoter or cell-specific promoters can be used to control the location of expression. For example, one or more transgenes can be inserted adjacent or near to a tissue-specific promoter. Tissue-specific promoters can be a FABP promoter, a Lck promoter, a CamKII promoter, a CD19 promoter, a Keratin promoter, an Albumin promoter, an aP2 promoter, an insulin promoter, an MCK promoter, an MyHC promoter, a WAP promoter, or a Col2A promoter.

[0493] Inducible promoters can be used as well. These inducible promoters can be turned on and off when desired, by adding or removing an inducing agent. It is contemplated that an inducible promoter can be, but is not limited to, a Lac, tac, trc, trp, araBAD, phoA, recA, proU, cst-1, tetA, cadA, nar, PL, cspA, T7, VHB, Mx, and/or Trex.

[0494] In some embodiments, the insert sequence comprises an enhancer. In some embodiments, the enhancer is tissue specific. In some embodiments, the insert sequence comprises multiple enhancers (e.g., at least 2).

### Methods of Genetically Modifying Cells

[0495] Provided herein are methods of making genomically modified cells, e.g., immune cells, e.g., immune cells described herein. In some embodiments, the methods comprise introducing into a cell (e.g., an immune cell) (e.g., ex vivo) an endonuclease system (e.g., a CRISPR system that comprises a gRNA and a Cas nuclease) that introduces a genomic disruption in a targeted gene sequence, and introducing into the cell a polynucleic acid construct (e.g., described herein) that comprises at least one (e.g., 2) cleavage sequences, at least one (e.g., two homology arms) and an insert sequence (e.g., a transgene), wherein the transgene is inserted into the genomic disruption. In some embodiments an endonuclease introduces a double strand break at the least one cleavage site. In some embodiments, a single endonuclease is introduced. In some embodiments, at least two endonucleases are used. In some embodiments, the insert sequence is incorporated into the genome through microhomology-mediated end joining. In some embodiments, the insert sequence is incorporated into the genome through single strand annealing. insert sequence is incorporated into the genome through homology mediated end joining.

### Cleavage of Polynucleic Acid Construct

[0496] In some embodiments, the one or more (e.g., two) homology arms in a polynucleic acid construct that flank an insert sequence are flanked by a cleavage site. For example, in some embodiments, a polynucleic acid construct comprises two homology arms, one on each end of an insert sequence (e.g., transgene), and each homology arm is flanked by a cleavage site. For example, from 5′ to 3′ the polynucleic acid can comprise a first cleavage site, a first homology arm, an insert sequence (e.g., a transgene), a second homology arm, and a second cleavage site. In some embodiments, a polynucleic acid construct contains one homology arm. For example, a polynucleic acid can comprise from 5′ to 3′ a cleavage site, a homology arm, an insert sequence (e.g., a transgene); or an insert sequence, a homology arm, and a cleavage site; or a cleavage site, an insert sequence, homology arm, and a cleavage site; or a cleavage site, a homology arm, an insert sequence, and a cleavage site.

[0497] In some embodiments, the cleavage site is recognized by an endonuclease. In some embodiments, the cleavage sites comprise a CRISPR, zinc finger, or TALEN system cleavage site, as described herein. In some embodiments, the cleavage site comprises a CRISPR system cleavage site. In some embodiments, the CRISPR system cleavage site comprises a PAM sequence (e.g., as described herein) and a targeting nucleic acid sequence recognized by a gRNA (e.g., as described herein).

[0498] In some embodiments, cleavage at the cleavage site is mediated by introducing an endonuclease into the cell. In some embodiments, cleavage at the cleavage site is mediated by introducing a CRISPR system (e.g., as described herein) into the cell. In some embodiments, the CRISPR system comprises an endonuclease (e.g., as described herein) and a gRNA (e.g., as described herein).

### Genome Target Site

[0499] In some embodiments, the insert sequence is inserted into an endogenous gene in the genome of the cell. In some embodiments, the gene is a safe harbor locus, e.g., AAVS (e.g., AAVS1, AAVS2), CCR5, hROSA26, albumin. or HPRT.

[0500] In some embodiments, the gene codes for a cell surface receptor (e.g., TCR, BCR).

[0501] In some embodiments, the gene codes for an inhibitory immune checkpoint protein. In some embodiments, the inhibitory immune checkpoint protein is A2AR, B7-H3, B7-H4, BTLA, CTLA-4, IDO, KIR, LAG3, PD-1, TIM-3, VISTA or CISH. In some embodiments, the gene codes for a gene in Table 1.

[0502] In some cases, a construct provided herein can comprise homology arms that target any one of the exemplary endogenous genes from Table 1 and or other comparable genes. For example, a construct can comprise homology arms that are specific to a region of a gene in Table 1. In some aspects, an exemplary endogenous gene can be disrupted with a transgene insert sequence provided herein. The disruption may be sufficient to reduce and/or eliminate expression of an RNA or protein encoded by the endogenous gene.

TABLE 1
Exemplary Endogenous Genes

| | | | | NCBI | | | |
|---|---|---|---|---|---|---|---|
| | | | | number | | | |
| SEQ | | | | (GRCh38.p2) | | | Location |
| ID | Gene | | | *AC010327.8 | Original | Original | in |
| NO | Symbol | Abbreviation | Name | **GRCh38.p7 | Start | Stop | genome |
| 1 | ADORA2A | A2aR; | adenosine A2a | 135 | 24423597 | 24442360 | 22q11.23 |
| | | RDC8; | receptor | | | | |
| | | ADORA2 | | | | | |
| 3 | CD276 | B7H3; B7- | CD276 molecule | 80381 | 73684281 | 73714518 | 15q23-q24 |
| | | H3; B7RP- | | | | | |
| | | 2; 4Ig-B7- | | | | | |
| | | H3 | | | | | |
| 4 | VTCN1 | B7X; | V-set domain | 79679 | 117143587 | 117270368 | 1p13.1 |
| | | B7H4; | containing T cell | | | | |
| | | B7S1; B7- | activation inhibitor | | | | |
| | | H4; B7h.5; | 1 | | | | |
| | | VCTN1; | | | | | |
| | | PRO1291 | | | | | |
| 5 | BTLA | BTLA1; | B and T lymphocyte | 151888 | 112463966 | 112499702 | 3q13.2 |
| | | CD272 | associated | | | | |
| 6 | CTLA4 | GSE; | cytotoxic T- | 1493 | 203867788 | 203873960 | 2q33 |
| | | GRD4; | lymphocyte- | | | | |
| | | ALPS5; | associated protein 4 | | | | |
| | | CD152; | | | | | |
| | | CTLA-4; | | | | | |
| | | IDDM12; | | | | | |
| | | CELIAC3 | | | | | |
| 7 | IDO1 | IDO; | indoleamine 2,3- | 3620 | 39913809 | 39928790 | 8p12-p11 |
| | | INDO; | dioxygenase 1 | | | | |
| | | IDO-1 | | | | | |
| 8 | KIR3DL1 | KIR; | killer cell | 3811 | 54816438 | 54830778 | 19q13.4 |
| | | NKB1; | immunoglobulin- | | | | |
| | | NKAT3; | like receptor, three | | | | |
| | | NKB1B; | domains, long | | | | |
| | | NKAT-3; | cytoplasmic tail, 1 | | | | |
| | | CD158E1; | | | | | |
| | | KIR3DL2; | | | | | |
| | | KIR3DL1/ | | | | | |
| | | S1 | | | | | |
| 9 | LAG3 | LAG3; | lymphocyte- | 3902 | 6772483 | 6778455 | 12p13.32 |
| | | CD223 | activation gene 3 | | | | |
| 10 | PDCD1 | PD1; PD- | programmed cell | 5133 | 241849881 | 241858908 | 2q37.3 |
| | | 1; CD279; | death 1 | | | | |
| | | SLEB2; | | | | | |
| | | hPD-1; | | | | | |
| | | hPD-1; | | | | | |
| | | hSLE1 | | | | | |
| 11 | HAVCR2 | TIM3; | hepatitis A virus | 84868 | 157085832 | 157109237 | 5q33.3 |
| | | CD366; | cellular receptor 2 | | | | |
| | | KIM-3; | | | | | |
| | | TIMD3; | | | | | |
| | | Tim-3; | | | | | |
| | | TIMD-3; | | | | | |
| | | HAVcr-2 | | | | | |
| 12 | VISTA | C10orf54, | V-domain | 64115 | 71747556 | 71773580 | 10q22.1 |
| | | differentiation | immunoglobulin | | | | |
| | | of | suppressor of T-cell | | | | |
| | | ESC-1 | activation | | | | |
| | | (Dies1); | | | | | |
| | | platelet | | | | | |
| | | receptor | | | | | |
| | | Gi24 | | | | | |
| | | precursor; | | | | | |
| | | PD1 | | | | | |
| | | homolog | | | | | |
| | | (PD1H) | | | | | |
| | | B7H5; | | | | | |
| | | GI24; B7- | | | | | |
| | | H5; | | | | | |
| | | SISP1; | | | | | |
| | | PP2135 | | | | | |
| 13 | CD244 | 2B4; 2B4; | CD244 molecule, | 51744 | 160830158 | 160862902 | 1q23.3 |
| | | NAIL; | natural killer cell | | | | |
| | | Nmrk; | receptor 2B4 | | | | |
| | | NKR2B4; | | | | | |
| | | SLAMF4 | | | | | |
| 14 | CISH | CIS; G18; | cytokine inducible | 1154 | 50606454 | 50611831 | 3p21.3 |
| | | SOCS; | SH2-containing | | | | |
| | | CIS-1; | protein | | | | |
| | | BACTS2 | | | | | |
| 15 | HPRT1 | HPRT; | hypoxanthine | 3251 | 134452842 | 134500668 | Xq26.1 |
| | | HGPRT | phosphoribosyltrans | | | | |
| | | | ferase 1 | | | | |
| 16 | AAV*S1 | AAV | adeno-associated | 14 | 7774 | 11429 | 19q13 |
| | | | virus integration site | | | | |
| | | | 1 | | | | |
| 17 | CCR5 | CKR5; | chemokine (C-C | 1234 | 46370142 | 46376206 | 3p21.31 |
| | | CCR-5; | motif) receptor 5 | | | | |
| | | CD195; | (gene/pseudogene) | | | | |
| | | CKR-5; | | | | | |
| | | CCCKR5; | | | | | |
| | | CMKBR5; | | | | | |
| | | IDDM22; | | | | | |
| | | CC-CKR-5 | | | | | |
| 18 | CD160 | NK1; | CD160 molecule | 11126 | 145719433 | 145739288 | 1q21.1 |
| | | BY55; | | | | | |
| | | NK28 | | | | | |
| 19 | TIGIT | VSIG9; | T-cell | 201633 | 114293986 | 114310288 | 3q13.31 |
| | | VSTM3; | immunoreceptor | | | | |
| | | WUCAM | with Ig and ITIM | | | | |
| | | | domains | | | | |
| 20 | CD96 | TACTILE | CD96 molecule | 10225 | 111542079 | 111665996 | 3q13.1 |
| | | | | | | | 3q13.2 |
| 21 | CRTAM | CD355 | cytotoxic and | 56253 | 122838431 | 122872643 | 11q24.1 |
| | | | regulatory T-cell | | | | |
| | | | molecule | | | | |
| 22 | LAIR1 | CD305; | leukocyte | 3903 | 54353624 | 54370556 | 19q13.4 |
| | | LAIR-1 | associated | | | | |
| | | | immunoglobulin | | | | |
| | | | like receptor 1 | | | | |
| 23 | SIGLEC7 | p75; | sialic acid binding | 27036 | 51142294 | 51153526 | 19q13.3 |
| | | QA79; | Ig like lectin 7 | | | | |
| | | AIRM1; | | | | | |
| | | CD328; | | | | | |
| | | CDw328; | | | | | |
| | | D-siglec; | | | | | |
| | | SIGLEC7; | | | | | |
| | | SIGLECP2; | | | | | |
| | | SIGLEC19P; | | | | | |
| | | p75/AIRM1 | | | | | |
| 24 | SIGLEC9 | CD329; | sialic acid binding | 27180 | 51124880 | 51141020 | 19q13.41 |
| | | CDw329; | Ig like lectin 9 | | | | |
| | | FOAP-9; | | | | | |
| | | siglec-9; | | | | | |
| | | OBBP- | | | | | |
| | | LIKE | | | | | |
| 25 | TNFRSF10B | DR5; | tumor necrosis | 8795 | 23006383 | 23069187 | 8p22-p21 |
| | | CD262; | factor receptor | | | | |
| | | KILLER; | superfamily | | | | |
| | | TRICK2; | member 10b | | | | |
| | | TRICKB; | | | | | |
| | | ZTNFR9; | | | | | |
| | | TRAILR2; | | | | | |
| | | TRICK2A; | | | | | |
| | | TRICK2B; | | | | | |
| | | TRAIL- | | | | | |
| | | R2; | | | | | |
| | | KILLER/ | | | | | |
| | | DR5 | | | | | |
| 26 | TNFRSF10A | DR4; | tumor necrosis | 8797 | 23191457 | 23225167 | 8p21 |
| | | APO2; | factor receptor | | | | |
| | | CD261; | superfamily | | | | |
| | | TRAILR1; | member 10a | | | | |
| | | TRAILR-1 | | | | | |
| 27 | CASP8 | CAP4; | caspase 8 | 841 | 201233443 | 201287711 | 2q33-q34 |
| | | MACH; | | | | | |
| | | MCH5; | | | | | |
| | | FLICE; | | | | | |
| | | ALPS2B; | | | | | |
| | | Casp-8 | | | | | |
| 28 | CASP10 | MCH4; | caspase 10 | 843 | 201182898 | 201229406 | 2q33-q34 |
| | | ALPS2; | | | | | |
| | | FLICE2 | | | | | |
| 29 | CASP3 | CPP32; | caspase 3 | 836 | 184627696 | 184649475 | 4q34 |
| | | SCA-1; | | | | | |
| | | CPP32B | | | | | |
| 30 | CASP6 | MCH2 | caspase 6 | 839 | 109688628 | 109713904 | 4q25 |
| 31 | CASP7 | MCH3; | caspase 7 | 840 | 113679162 | 113730909 | 10q25 |
| | | CMH-1; | | | | | |
| | | LICE2; | | | | | |
| | | CASP-7; | | | | | |
| | | ICE-LAP3 | | | | | |
| 32 | FADD | GIG3; | Fas associated via | 8772 | 70203163 | 70207402 | 11q13.3 |
| | | MORT1 | death domain | | | | |
| 33 | FAS | APT1; | Fas cell surface | 355 | 88969801 | 89017059 | 10q24.1 |
| | | CD95; | death receptor | | | | |
| | | FAS1; | | | | | |
| | | APO-1; | | | | | |
| | | FASTM; | | | | | |
| | | ALPS1A; | | | | | |
| | | TNFRSF6 | | | | | |
| 34 | TGFBRII | AAT3; | transforming | 7048 | 30606493 | 30694142 | 3p22 |
| | | FAA3; | growth factor beta | | | | |
| | | LDS2; | receptor II | | | | |
| | | MFS2; | | | | | |
| | | RIIC; | | | | | |
| | | LDS1B; | | | | | |
| | | LDS2B; | | | | | |
| | | TAAD2; | | | | | |
| | | TGFR-2; | | | | | |
| | | TGFbeta- | | | | | |
| | | RII | | | | | |
| 35 | TGFBR1 | AAT5; | transforming | 7046 | 99104038 | 99154192 | 9q22 |
| | | ALK5; | growth factor beta | | | | |
| | | ESS1; | receptor I | | | | |
| | | LDS1; | | | | | |
| | | MSSE; | | | | | |
| | | SKR4; | | | | | |
| | | ALK-5; | | | | | |
| | | LDS1A; | | | | | |
| | | LDS2A; | | | | | |
| | | TGFR-1; | | | | | |
| | | ACVRLK4; | | | | | |
| | | tbetaR-I | | | | | |
| 36 | SMAD2 | JV18; | SMAD family | 4087 | 47833095 | 47931193 | 18q21.1 |
| | | MADH2; | member 2 | | | | |
| | | MADR2; | | | | | |
| | | JV18-1; | | | | | |
| | | hMAD-2; | | | | | |
| | | hSMAD2 | | | | | |
| 37 | SMAD3 | LDS3; | SMAD family | 4088 | 67065627 | 67195195 | 15q22.33 |
| | | LDS1C; | member 3 | | | | |
| | | MADH3; | | | | | |
| | | JV15-2; | | | | | |
| | | HSPC193; | | | | | |
| | | HsT17436 | | | | | |
| 38 | SMAD4 | JIP; | SMAD family | 4089 | 51030213 | 51085042 | 18q21.1 |
| | | DPC4; | member 4 | | | | |
| | | MADH4; | | | | | |
| | | MYHRS | | | | | |
| 39 | SKI | SGS; SKV | SKI proto-oncogene | 6497 | 2228695 | 2310213 | 1p36.33 |
| 40 | SKIL | SNO; | SKI-like proto- | 6498 | 170357678 | 170396849 | 3q26 |
| | | SnoA; | oncogene | | | | |
| | | SnoI; | | | | | |
| | | SnoN | | | | | |
| 41 | TGIF1 | HPE4; | TGFB induced | 7050 | 3411927 | 3458411 | 18p11.3 |
| | | TGIF | factor homeobox 1 | | | | |
| 42 | IL10RA | CD210; | interleukin 10 | 3587 | 117986391 | 118001483 | 11q23 |
| | | IL10R; | receptor subunit | | | | |
| | | CD210a; | alpha | | | | |
| | | CDW210A; | | | | | |
| | | HIL- | | | | | |
| | | 10R; IL- | | | | | |
| | | 10R1 | | | | | |
| 43 | IL10RB | CRFB4; | interleukin 10 | 3588 | 33266360 | 33297234 | 21q22.11 |
| | | CRF2-4; | receptor subunit | | | | |
| | | D21S58; | beta | | | | |
| | | D21S66; | | | | | |
| | | CDW210B; | | | | | |
| | | IL- | | | | | |
| | | 10R2 | | | | | |
| 44 | HMOX2 | HO-2 | heme oxygenase 2 | 3163 | 4474703 | 4510347 | 16p13.3 |
| 45 | IL6R | IL6Q; | interleukin 6 | 3570 | 154405193 | 154469450 | 1q21 |
| | | gp80; | receptor | | | | |
| | | CD126; | | | | | |
| | | IL6RA; | | | | | |
| | | IL6RQ; | | | | | |
| | | IL-6RA; | | | | | |
| | | IL-6R-1 | | | | | |
| 46 | IL6ST | CD130; | interleukin 6 signal | 3572 | 55935095 | 55994993 | 5q11.2 |
| | | GP130; | transducer | | | | |
| | | CDW130; | | | | | |
| | | IL-6RB | | | | | |
| 47 | CSK | CSK | c-src tyrosine kinase | 1445 | 74782084 | 74803198 | 15q24.1 |
| 48 | PAG1 | CBP; PAG | phosphoprotein | 55824 | 80967810 | 81112068 | 8q21.13 |
| | | | membrane anchor | | | | |
| | | | with | | | | |
| | | | glycosphingolipid | | | | |
| | | | microdomains 1 | | | | |
| 49 | SIT1 | SIT1 | signaling threshold | 27240 | 35649298 | 35650950 | 9p13- |
| | | | regulating | | | | p12 |
| | | | transmembrane | | | | |
| | | | adaptor 1 | | | | |
| 50 | FOXP3 | JM2; | forkhead box P3 | 50943 | 49250436 | 49269727 | Xp11.23 |
| | | AIID; | | | | | |
| | | IPEX; | | | | | |
| | | PIDX; | | | | | |
| | | XPID; | | | | | |
| | | DIETER | | | | | |
| 51 | PRDM1 | BLIMP1; | PR domain 1 | 639 | 106086320 | 106109939 | 6q21 |
| | | PRDI-BF1 | | | | | |
| 52 | BATF | SFA2; B- | basic leucine zipper | 10538 | 75522441 | 75546992 | 14q24.3 |
| | | ATF; | transcription factor, | | | | |
| | | BATF1; | ATF-like | | | | |
| | | SFA-2 | | | | | |
| 53 | GUCY1A2 | GC-SA2; | guanylate cyclase 1, | 2977 | 106674012 | 107018445 | 11q21- |
| | | GUC1A2 | soluble, alpha 2 | | | | q22 |
| 54 | GUCY1A3 | GUCA3; | guanylate cyclase 1, | 2982 | 155666568 | 155737062 | 4q32.1 |
| | | MYMY6; | soluble, alpha 3 | | | | |
| | | GC-SA3; | | | | | |
| | | GUC1A3; | | | | | |
| | | GUCSA3; | | | | | |
| | | GUCY1A1 | | | | | |
| 55 | GUCY1B2 | GUCY1B2 | guanylate cyclase 1, | 2974 | 50994511 | 51066157 | 13q14.3 |
| | | | soluble, beta 2 | | | | |
| | | | (pseudogene) | | | | |
| 56 | GUCY1B3 | GUCB3; | guanylate cyclase 1, | 2983 | 155758973 | 155807642 | 4q31.3- |
| | | GC-SB3; | soluble, beta 3 | | | | q33 |
| | | GUC1B3; | | | | | |
| | | GUCSB3; | | | | | |
| | | GUCY1B1; | | | | | |
| | | GC-S-beta-1 | | | | | |
| 57 | TRA | IMD7; | T-cell receptor | 6955 | 21621904 | 22552132 | 14q11.2 |
| | | TCRA; | alpha locus | | | | |
| | | TCRD; | | | | | |
| | | TRAalpha; | | | | | |
| | | TRAC | | | | | |
| 58 | TRB | TCRB; | T cell receptor beta | 6957 | 142299011 | 142813287 | 7q34 |
| | | TRBbeta | locus | | | | |
| 59 | EGLN1 | HPH2; | egl-9 family | 54583 | 231363751 | 231425044 | 1q42.1 |
| | | PHD2; | hypoxia-inducible | | | | |
| | | SM20; | factor 1 | | | | |
| | | ECYT3; | | | | | |
| | | HALAH; | | | | | |
| | | HPH-2; | | | | | |
| | | HIFPH2; | | | | | |
| | | ZMYND6; | | | | | |
| | | C1orf12; | | | | | |
| | | HIF-PH2 | | | | | |
| 60 | EGLN2 | EIT6; | egl-9 family | 112398 | 40799143 | 40808441 | 19q13.2 |
| | | PHD1; | hypoxia-inducible | | | | |
| | | HPH-1; | factor 2 | | | | |
| | | HPH-3; | | | | | |
| | | HIFPH1; | | | | | |
| | | HIF-PH1 | | | | | |
| 61 | EGLN3 | PHD3; | egl-9 family | 112399 | 33924215 | 33951083 | 14q13.1 |
| | | HIFPH3; | hypoxia-inducible | | | | |
| | | HIFP4H3 | factor 3 | | | | |
| 62 | PPP1R12C** | p84; p85; | protein phosphatase | 54776 | 55090913 | 55117600 | 19q13.42 |
| | | LENG3; | 1 regulatory subunit | | | | |
| | | MBS85 | 12C | | | | |

[0503] In some embodiments, the gene codes for a cell surface receptor that comprises an ITIM. In some embodiments, the endogenous gene is TRAC, TCRB, adenosine A2a receptor (ADORA), CD276, V-set domain containing T cell activation inhibitor 1 (VTCN1), B and T lymphocyte associated (BTLA), cytotoxic T-lymphocyte-associated protein 4 (CTLA4), indoleamine 2,3-dioxygenase 1 (IDO1), killer cell immunoglobulin-like receptor, three domains, long cytoplasmic tail, 1 (KIR3DL1), lymphocyte-activation gene 3 (LAG3), programmed cell death 1 (PD-1), hepatitis A virus cellular receptor 2 (HAVCR2), V-domain immunoglobulin suppressor of T-cell activation (VISTA), natural killer cell receptor 2B34 (CD244), cytokine inducible SH2-containing protein (CISH), hypoxanthine phosphoribosyltransferase 1 (HPRT), adeno-associated virus integration site (AAVS (e.g., AAVS1, AAVS2)), or chemokine (C—C motif) receptor 5 (gene/pseudogene) (CCR5), CD160 molecule (CD160), T-cell immunoreceptor with Ig and ITIM domains (TIGIT), CD96 molecule (CD96), cytotoxic and regulatory T-cell molecule (CRTAM), leukocyte associated immunoglobulin like receptor 1 (LAIR1), sialic acid binding Ig like lectin 7 (SIGLEC7), sialic acid binding Ig like lectin 9 (SIGLEC9), tumor necrosis factor receptor superfamily member 10b (TNFRSF10B), tumor necrosis factor receptor superfamily member 10a (TNFRSF10A), caspase 8 (CASP8), caspase 10 (CASP10), caspase 3 (CASP3), caspase 6 (CASP6), caspase 7 (CASP7), Fas associated via death domain (FADD), Fas cell surface death receptor (FAS), transforming growth factor beta receptor II (TGFBRII), transforming growth factor beta receptor I (TGFBR1), SMAD family member 2 (SMAD2), SMAD family member 3 (SMAD3), SMAD family member 4 (SMAD4), SKI proto-oncogene (SKI), SKI-like proto-oncogene (SKIL), TGFB induced factor homeobox 1 (TGIF1), interleukin 10 receptor subunit alpha (IL10RA), interleukin 10 receptor subunit beta (IL10RB), heme oxygenase 2 (HMOX2), interleukin 6 receptor (IL6R), interleukin 6 signal transducer (IL6ST), c-src tyrosine kinase (CSK), phosphoprotein membrane anchor with glycosphingolipid microdomains 1 (PAG1), signaling threshold regulating transmembrane adaptor 1 (SIT1), forkhead box P3 (FOXP3), PR domain 1 (PRDM1), basic leucine zipper transcription factor, ATF-like (BATF), guanylate cyclase 1, soluble, alpha 2 (GUCY1A2), guanylate cyclase 1, soluble, alpha 3 (GUCY1A3), guanylate cyclase 1, soluble, beta 2 (GUCY1B2), guanylate cyclase 1, soluble, beta 3 (GUCY1B3), prolyl hydroxylase domain (PHD1, PHD2, PHD3) family of proteins, A2AR, B7-H3, B7-H4, IDO, KIR, LAG3, TIM-3, VISTA, CD27, CD40, CD122, OX40, GITR, CD137, CD28, ICOS, A2AR, B7-H3, B7-H4, or PPP1R12C.

[0504] In some embodiments, multiple (e.g., at least 2, 3, 4, 5, 6, or more) target genes are disrupted in the host genome. In some embodiments, the genomic disruptions are double strand DNA. In some embodiments, one double strand break is introduced into a target site in the host genome. In some embodiments, at least two double strand breaks are introduced into two different target sites in the host genome. In some embodiments, two double strand breaks are introduced into two different target sites in the host genome in order to mediate deletion of a large section of DNA. In some embodiments, two double strand breaks are introduced into a single gene in the host genome in order to mediate deletion of a large section of DNA. In some embodiments, the genomic disruption suppresses expression of a protein encoded by the gene comprising the genomic disruption. In some embodiments, the genomic disruption suppresses expression of a functional protein encoded by the gene comprising the genomic disruption.

### DNA Repair Pathways

[0505] In some embodiments, provided herein are methods of resolving introduced double-stranded breaks in the genome of call using a repair template with at least one double strand break introduced. The introduction of at least one double stand break in the repair template permits the use of alternate or additional repair pathways, for example, pathways that comprise end resection, pathways that require only short homology arms in the repair template, or a combination thereof, for insertion of an insert sequence into the genome. Non-limiting examples of alternate or additional repair pathways that can be utilized include pathways comprising single strand annealing, homology-mediated end joining, microhomology-mediated end joining, alternative end joining, and combinations thereof.

[0506] In some embodiments, the methods provided herein exhibit an increased integration efficiency compared to a comparable method using a repair template that does not have the at least one double strand break.

[0507] In some embodiments, the methods described herein provide for an increase in percentage of cells which incorporate the insert sequence relative to a comparable population using a repair template that does not have the at least one double strand break. In some embodiments, at least 3%, 4%, 5%, 6%, 7%, 8%, 9%, 10%, 15%, 20%, 25%, 30%, 35%, 40%, 50%, 55%, 60%, 65%, 70%, 75%, 80%, 85%, 90%, or 95% of the cells in population of cells described herein comprise an insert sequence. In some embodiments, at least 10% of the cells in population of cells described herein comprise an insert sequence. In some embodiments, at least 20% of the cells in population of cells described herein comprise an insert sequence. In some embodiments, at least 30% of the cells in population of cells described herein comprise an insert sequence. In some embodiments, at least 40% of the cells in population of cells described herein comprise an insert sequence. In some embodiments, at least 50% of the cells in population of cells described herein comprise an insert sequence. In some embodiments, at least 60% of the cells in population of cells described herein comprise an insert sequence. In some embodiments, at least 70% of the cells in population of cells described herein comprise an insert sequence. In some embodiments, at least 80% of the cells in population of cells described herein comprise an insert sequence. In some embodiments, at least 90% of the cells in population of cells described herein comprise an insert sequence. In some embodiments, at least 3%, 4%, 5%, 6%, 7%, 8%, 9%, 10%, 15%, 20%, 25%, 30%, 35%, 40%, 50%, 55%, 60%, 65%, 70%, 75%, 80%, 85%, 90%, or 95% of the cells in population of cells described herein comprise an insert sequence and are viable. In some embodiments, at least 10% of the cells in population of cells described herein comprise an insert sequence and are viable. In some embodiments, at least 20% of the cells in population of cells described herein comprise an insert sequence and are viable. In some embodiments, at least 30% of the cells in population of cells described herein comprise an insert sequence and are viable. In some embodiments, at least 40% of the cells in population of cells described herein comprise an insert sequence and are viable. In some embodiments, at least 50% of the cells in population of cells described herein comprise an insert sequence and are viable. In some embodiments, at least 60% of the cells in population of cells described herein comprise an insert sequence and are viable. In some embodiments, at least 70% of the cells in population of cells described herein comprise an insert sequence and are viable. In some embodiments, at least 80% of the cells in population of cells described herein comprise an insert sequence and are viable. In some embodiments, at least 90% of the cells in population of cells described herein comprise an insert sequence and are viable. In some embodiments, integration of a transgene is measured 1-30, 1-21, 1-14, 1-7, 1-5, 1-4, 1-3, 1-2 days post introduction of said transgene. In some embodiments, cell viability is measured 1-30, 1-21, 1-14, 1-7, 1-5, 1-4, 1-3, 1-2 days post introduction of said transgene.

[0508] In some embodiments, efficiency of insert sequence integration is a function of the efficiency of the introduction of at least one double strand break in the polynucleic acid construct that comprises the insert sequence. In some embodiments, efficiency of insert sequence integration is a function of the efficiency of the excision of transgene from the polynucleic acid construct that comprises the insert sequence.

[0509] In some embodiments, the cells comprising the integrated transgene are expanded. In some embodiments, the cells comprising the integrated transgene are selectively expanded. In some embodiments, the cells comprising the integrated transgene are selectively expanded in vitro.

### Cell Viability and Integration Efficiency

[0510] Provided herein are methods of enhancing genomic transplantation. In some cases, methods provided herein increase cell viability. In some cases, methods provided herein increase transgene integration efficiency (also termed “transfection efficiency”). In some cases, methods provided herein increase both cell viability and transgene integration efficiency.

[0511] In some cases, cell viability is measured by cell counting via various approaches. In some cases, cell counting can be aided by staining of live cells. In some cases, cell counting can be automated, for instance, by flow cytometry or object recognition algorithm. In some cases, cell counting can be performed manually. In some cases, cell viability can be directly observed, for example, cells in culture dish tend to clump when dying. In some cases, cell viability can be measured by a viability assay, which can measure for instance, but not limited to, cytolysis, membrane leakage, mitochondrial activity or caspase expression, certain cellular function, expression of certain genes, genome integrity. In some cases, cell viability can be measured by viability dye staining. In some cases, the viability dye staining can be followed by flow cytometry. Viability dyes can differentiate live or dead cells or dying cells. The differential staining of the cells can be detected, e.g., by flow cytometry or microscopy.

[0512] Integration efficiency can be measured by detecting genomic insertion of transgene in the cells. In some cases, integration efficiency can be measured by detecting transgene product. For example, the exogenous polynucleic acid can comprise a reporter gene, e.g. a fluorescent protein, e.g. GFP, YFP, or mCherry. In some cases, the integration efficiency can be measured by examining the expression of the reporter gene, for example, by flow cytometry, which can count the cells expressing the fluorescent protein. In some cases, integration efficiency can be measured by assessing the genomic sequences of the electroporated cells directly, for instance, by examining the insertion of the transgene via sequencing.

[0513] In some embodiments, the methods provided herein exhibit an increased integration efficiency compared to a comparable method using a repair template that does not have the at least one double strand break.

[0514] In some embodiments, the methods described herein provide for an increase in percentage of cells which incorporate the insert sequence relative to a comparable population using a repair template that does not have the at least one double strand break. In some embodiments, at least 3%, 4%, 5%, 6%, 7%, 8%, 9%, 10%, 15%, 20%, 25%, 30%, 35%, 40%, 50%, 55%, 60%, 65%, 70%, 75%, 80%, 85%, 90%, or 95% of the cells in population of cells described herein comprise an insert sequence. In some embodiments, at least 10% of the cells in population of cells described herein comprise an insert sequence. In some embodiments, at least 20% of the cells in population of cells described herein comprise an insert sequence. In some embodiments, at least 30% of the cells in population of cells described herein comprise an insert sequence. In some embodiments, at least 40% of the cells in population of cells described herein comprise an insert sequence. In some embodiments, at least 50% of the cells in population of cells described herein comprise an insert sequence. In some embodiments, at least 60% of the cells in population of cells described herein comprise an insert sequence. In some embodiments, at least 70% of the cells in population of cells described herein comprise an insert sequence. In some embodiments, at least 80% of the cells in population of cells described herein comprise an insert sequence. In some embodiments, at least 90% of the cells in population of cells described herein comprise an insert sequence. In some embodiments, at least 3%, 4%, 5%, 6%, 7%, 8%, 9%, 10%, 15%, 20%, 25%, 30%, 35%, 40%, 50%, 55%, 60%, 65%, 70%, 75%, 80%, 85%, 90%, or 95% of the cells in population of cells described herein comprise an insert sequence and are viable. In some embodiments, at least 10% of the cells in population of cells described herein comprise an insert sequence and are viable. In some embodiments, at least 20% of the cells in population of cells described herein comprise an insert sequence and are viable. In some embodiments, at least 30% of the cells in population of cells described herein comprise an insert sequence and are viable. In some embodiments, at least 40% of the cells in population of cells described herein comprise an insert sequence and are viable. In some embodiments, at least 50% of the cells in population of cells described herein comprise an insert sequence and are viable. In some embodiments, at least 60% of the cells in population of cells described herein comprise an insert sequence and are viable. In some embodiments, at least 70% of the cells in population of cells described herein comprise an insert sequence and are viable. In some embodiments, at least 80% of the cells in population of cells described herein comprise an insert sequence and are viable. In some embodiments, at least 90% of the cells in population of cells described herein comprise an insert sequence and are viable. In some embodiments, integration of a transgene is measured 1-30, 1-21, 1-14, 1-7, 1-5, 1-4, 1-3, 1-2 days post introduction of said transgene. In some embodiments, cell viability is measured 1-30, 1-21, 1-14, 1-7, 1-5, 1-4, 1-3, 1-2 days post introduction of said transgene.

[0515] In some embodiments, efficiency of insert sequence integration is a function of the efficiency of the introduction of at least one double strand break in the polynucleic acid construct that comprises the insert sequence. In some embodiments, efficiency of insert sequence integration is a function of the efficiency of the excision of transgene from the polynucleic acid construct that comprises the insert sequence.

[0516] In some embodiments, the cells comprising the integrated transgene are expanded. In some embodiments, the cells comprising the integrated transgene are selectively expanded. In some embodiments, the cells comprising the integrated transgene are selectively expanded in vitro.

### Nuclease Treatment

[0517] Provided herein are methods of improving overall yield from cell engineering, including, for instance, improving cell viability after cell engineering, and/or improving transfection efficiency, comprising contacting genetically modified cells with a sufficient amount of at least one nuclease. In some instances, contacting with a sufficient amount of at least one nuclease for a sufficient period of time can increase cell viability. In some cases, contacting with a sufficient amount of at least one nuclease for a period of time can increase transfection efficiency. In some instances, contacting with a sufficient amount of at least one nuclease for a sufficient period of time can increase both cell viability and transfection efficiency.

[0518] Without wishing to be bound by a particular theory, as one of skills in the art would understand, during transfection, at least one point of the cell membrane is broken to allow exogenous nucleic acids, and/or other agent to enter the cell, causing invasive damage to the cell integrity and potentially with a lasting effect despite of the reversible nature of the membrane's open up. Moreover, as the exogenous agents are introduced to the intracellular environment, cells are not necessarily tolerant to their intracellular presence. Another potential adverse effect may come from the exogenous agents that can be trapped between the lipid bilayer of the cell membrane as the membrane reseals after the temporary open up.

[0519] In some instances, the method of promoting cell viability can comprise contacting the cells with a nuclease, which, by definition, can catalyze the hydrolytic cleavage of phosphodiester linkages (hydrolysis or digestion) in polynucleic acids with selectivity. The nuclease can include deoxyribonuclease (DNase), ribonuclease (RNase), or both. DNase can specifically digest DNAs, while RNase can digest RNAs specifically. Nucleases can also be classified as endonucleases or exonucleases. An exonuclease can refer to any of a group of enzymes that catalyze the hydrolysis of a polynucleic acid molecule from its' 5′, 3′, both ends. An endonuclease can refer to any of a group of enzymes that catalyze the hydrolysis of a polynucleic acid molecule between nucleic acids in the interior of a polynucleic acid molecule. Some enzymes can have both exonuclease and endonuclease properties. In addition, some enzymes are able to digest both DNA and RNA sequences.

[0520] Contacting with a nuclease can lead to an increase in viability percentage about 5%, about 10%, about 15%, about 20%, about 25%, about 30%, about 35%, about 40%, about 45%, about 50%, about 55%, about 60%, about 65%, about 70%, about 75%, about 80%, about 90%, about 100%, about 125%, about 150%, about 175%, about 200%, about 250%, about 300%, or even more. In some cases, an increase in viability percentage can be from about 50% to about 200%. Contacting with a nuclease can lead to an increase in integration efficiency can be about 5%, about 10%, about 15%, about 20%, about 25%, about 30%, about 35%, about 40%, about 45%, about 50%, about 55%, about 60%, about 65%, about 70%, about 75%, about 80%, about 90%, about 100%, about 125%, about 150%, about 175%, about 200%, about 250%, about 300%, or even more. In some cases, an increase in integration efficiency can be from about 50% to about 200%.

[0521] Non-limiting examples of the DNase in connection with the subject matter described herein can include DNase I, Benzonase, Exonuclease I, Exonuclease III, Mung Bean Nuclease, Nuclease BAL 31, RNase I, S1 Nuclease, Lambda Exonuclease, RecJ, T7 exonuclease, and various restriction enzymes that are specialized in breaking phosphodiester linkages in their respective recognition sequences. Non-limiting examples of the RNase in connection with the subject matter disclosed herein can include RNase A, RNase H, RNase III, RNase L, RNase P, RNase PhyM, RNase T1, RNase T1, RNase U2, RNase V, Polynucleotide Phosphorylase, RNase PH, RNase R, RNase D, RNase I, RNase II, RNase T, Oligoribonuclease, Exoribonuclease I, and Exoribonuclease II. Appropriate nuclease can be chosen depending on the property of the polynucleic acid being introduced into the cell and the type of the cell being transfected.

[0522] In some cases, the nuclease can be applied after the cell transfection. In some cases, the nuclease can be introduced immediately after the cell transfection is completed. In some cases, the nuclease can be introduced while the cell transfection is being conducted, for instance, applied while electroporation is being performed, or applied while the cell is still being exposed to transfection reagents. In some cases, the nuclease can be introduced up to several minutes to several hours post-transfection. The time delay between the completion of cell transfection and application of the nuclease can be about 30 sec, about 1 min, about 2 min, about 3 min, about 4 min, about 5 min, about 6 min, about 7 min, about 8 min, about 9 min, about 10 min, about 15 min, about 30 min, about 45 min, about 60 min, about 1.5 hrs, about 2 hrs, about 3 hrs, about 4 hrs, about 5 hrs, about 7.5 hrs, about 8 hrs, about 10 hrs, about 12 hrs, about 20 hrs, about 30 hrs, about 40 hrs, about 50 hrs, about 60 hrs, about 70 hrs, about 80 hrs, about 90 hrs, or about 1 week. In some cases, the time delay can be even longer.

[0523] In some cases, the nuclease can be applied before the cell transfection. A nuclease can be present in the cell culture through a period of time before the transfection. In some cases, the “pre-treatment” of the nuclease can promote the general health of the target cells. For instance, in many cases, it can promote the survival of the cells after isolation from the living organ of an organism. The nuclease can be present both before and after the cell transfection.

[0524] The nuclease can be supplied in the culture medium at a concentration about 1 μg/ml, 10 μg/ml, 50 μg/ml, 100 μg/ml, 200 μg/ml, 300 μg/ml, 400 μg/ml, 500 μg/ml, 600 μg/ml, 700 μg/ml, 800 μg/ml, 900 μg/ml, 950 μg/ml, 1 mg/ml, 2 mg/ml, 3 mg/ml, 4 mg/ml, 5 mg/ml, 6 mg/ml, 7 mg/ml, 8 mg/ml, 9 mg/ml, 10 mg/ml, 20 mg/ml, 30 mg/ml, 40 mg/ml, 50 mg/ml, 100 mg/ml, 200 mg/ml, 500 mg/ml, or about a value between any two of these values. The nuclease can be supplied in the culture medium at a concentration about 1 mg/mL. The nuclease can be supplied in the culture medium, and the culture medium containing the nuclease can be replaced once about every 3 hr, 6 hr, 12 hr, 20 hr, 21 hr, 22 hr, 23 hr, 24 hr, 26 hr, 28 hr, 30 hr, 32 hr, 34 hr, 36 hr, 40 hr, 44 hr, 48 hr, 50 hr, 60 hr. The frequent replacement of the culture medium can maintain the concentration of the nuclease at a certain level.

[0525] As those skilled in the art would appreciate, the choice of the nuclease, the concentration of the nuclease, and the timing and the duration for the incubation of the nuclease can vary depending on many parameters of the particular application of the subject matter described herein. The various parameters can include, but not limited to, the cell type, the properties of the polynucleic acids to be transferred, the overall health of the cells, the expected viability to achieve, and the intended use of the transfected cells.

[0526] In some cases, the cells can be treated/incubated with the nuclease for a period of time. The incubation time can be at least about 1 min, at least about 2 min, at least about 3 min, at least about 4 min, at least about 5 min, at least about 10 min, at least about 20 min, at least about 30 min, at least about 45 min, or at least about 60 min. The incubation time can be at least about 1 hr, at least about 2 hrs, at least about 3 hrs, at least about 4 hrs, at least about 5 hrs, at least about 7.5 hrs, at least about 8 hrs, at least about 10 hrs, at least about 12 hrs, at least about 20 hrs, at least about 30 hrs, at least about 40 hrs, at least about 50 hrs, at least about 60 hrs, at least about 70 hrs, at least about 80 hrs, at least about 90 hrs, or at least about 1 week. In some cases, the incubation time can be at least 1 week, at least 2 weeks, at least 3 weeks, or even longer.

[0527] In some instances, the cells can be exposed to the nuclease for 1 to 30 min at 18-25° C. in a mixture. In some examples, the mixture can comprise PBS, FBS, magnesium, and DNase.

### Immune Stimulatory Agent

[0528] Provided herein are methods of improving overall yield from cell engineering, including, for instance, improving cell viability after cell engineering, and/or improving transfection efficiency, comprising contacting genetically modified cells with a sufficient amount of at least one immune stimulatory agent. In some instances, contacting with a sufficient amount of at least one immune stimulatory agent for a sufficient period of time can increase cell viability. In some cases, contacting with a sufficient amount of at least one immune stimulatory agent for a period of time can increase transfection efficiency. In some instances, contacting with a sufficient amount of at least one immune stimulatory agent for a sufficient period of time can increase both cell viability and transfection efficiency.

[0529] Immune stimulatory agent can include any type of reagent that can stimulate an immune cell. For example, an immune stimulatory agent can comprise a cytokine. In some cases, an immune stimulatory agent can comprise an antibody against or a ligand of an immune cell receptor.

[0530] Cytokines refer to proteins (e.g., chemokines, interferons, lymphokines, interleukins, and tumor necrosis factors) released by cells which can affect cell behavior. Cytokines are produced by a broad range of cells, including immune cells such as macrophages, B lymphocytes, T lymphocytes and mast cells, as well as endothelial cells, fibroblasts, and various stromal cells. A given cytokine can be produced by more than one type of cell. Cytokines can be involved in producing systemic or local immunomodulatory effects. Exemplary cytokines include, but are not limited to, IL-2, IL-7, IL-12, IL-15, IL-21, or any combination thereof.

[0531] In some cases, an aAPC may not induce allospecificity. An aAPC may not express HLA in some cases. An aAPC may be genetically modified to stably express genes that can be used to activation and/or stimulation. In some cases, a K562 cell may be used for activation. A K562 cell may also be used for expansion. A K562 cell can be a human erythroleukemic cell line. A K562 cell may be engineered to express genes of interest. K562 cells may not endogenously express HLA class I, II, or CD1d molecules but may express ICAM-1 (CD54) and LFA-3 (CD58). K562 may be engineered to deliver a signal 1 to T cells. For example, K562 cells may be engineered to express HLA class I. In some cases, K562 cells may be engineered to express additional molecules such as B7, CD80, CD83, CD86, CD32, CD64, 4-1BBL, anti-CD3, anti-CD3 mAb, S-2-hydroxyglutarate, anti-CD28, anti-CD28 mAb, CD1d, anti-CD2, membrane-bound IL-15, membrane-bound IL-17, membrane-bound IL-21, membrane-bound IL-2, truncated CD19, or any combination. In some cases, an engineered K562 cell can expresses a membranous form of anti-CD3 mAb, clone OKT3, in addition to CD80 and CD83. In some cases, an engineered K562 cell can expresses a membranous form of anti-CD3 mAb, clone OKT3, membranous form of anti-CD28 mAb in addition to CD80 and CD83. In some cases, modified target cells of present disclosure can comprise immune cells, e.g., T cells or B cells. Immune cells can be stimulated by immune stimulatory agent to expand. For example, T cells can be expanded by contact with a surface having attached thereto an agent that can stimulate a CD3 TCR complex associated signal and a ligand that can stimulate a co-stimulatory molecule on the surface of the T cells. In particular, T cell populations can be stimulated such as by contact with an anti-CD3 antibody or antigen-binding fragment thereof, or an anti-CD2 antibody immobilized on a surface, or by contact with a protein kinase C activator (e.g., bryostatin) sometimes in conjunction with a calcium ionophore. For co-stimulation of an accessory molecule on the surface of the T cells, a ligand that binds the accessory molecule can be used. For example, a population of T cells can be contacted with an anti-CD3 antibody and an anti-CD28 antibody, under conditions that can stimulate proliferation of the T cells. In some cases, 4-1BB can be used to stimulate cells. For example, cells can be stimulated with 4-1BB and IL-21 or another cytokine.

[0532] To stimulate proliferation of either CD4 T cells or CD8 T cells, an anti-CD3 antibody and an anti-CD28 antibody can be used. For example, the agents providing a signal may be in solution or coupled to a surface. In some cases, the cells, such as T cells, can be combined with agent-coated beads. Each bead can be coated with either anti-CD3 antibody or an anti-CD28 antibody, or in some cases, a combination of the two. Any bead to cell ratio can be utilized. In some cases, a ratio is 5:1; 2.5:1; 1:1; 1:2; 1:5; 1:2.5; or 2:1 bead:cells. Immune stimulatory agents that are appropriate for modified T cell proliferation and viability include, but not limited to, interleukin-2 (IL-2), IFN-g, IL-4, IL-7, GM-CSF, IL-10, IL-21, IL-15, TGF beta, and TNF alpha or any derivatives thereof.

[0533] In some cases, an additional stimulation protocol can be utilized during preparation of modified cells. An additional stimulation can comprise an initial stimulation utilizing an immune stimulatory agent provided herein. Stimulation can be timed such that cells are stimulated prior, concurrent, and/or after electroporation. In some cases, cells may be subject to one or more stimulations. In some cases, cells may be subject to 1, 2, 3, 4, 5, or up to about 6 stimulations utilizing any of the antibodies, antibody fragments thereof, and/or any beads displaying stimulatory antibodies or fragments thereof. In some cases, an additional stimulation comprises continuous stimulation. For example, after an electroporation, cells may be continuously stimulated thereafter using any of the compositions and methods provided herein, for example anti-CD3 and/or anti-CD28. An additional stimulation may increase cellular expansion as compared to a comparable method that lacks the additional stimulation. In some cases, the additional stimulation, such as a second stimulation, is performed after cellular electroporation. In some cases, a second stimulation is performed immediately after electroporation. In other cases, a second stimulation is performed from about 5 min, 10 min, 20 min, 30 min, 40 min, 50 min, 1 hr, 2 hrs, 4 hrs, 6 hrs, 8 hrs, 10 hrs, 12 hrs, 14 hrs, 16 hrs, 18 hrs, or up to about 20 hrs after an electroporation. The additional stimulation may be performed for any length of time. For example, the additional stimulation may be performed for about 2 hrs, 4 hrs, 6 hrs, 8 hrs, 10 hrs, 12 hrs, 14 hrs, 16 hrs, 18 hrs, 20 hrs, 22 hrs, 24 hrs, 26 hrs, 28 hrs, 30 hrs, 32 hrs, 34 hrs, 36 hrs, 38 hrs, 40 hrs, 42 hrs, 44 hrs, 46 hrs, 48 hrs, or up to about 50 hrs. In some cases, the additional stimulation is from about 24-48 hrs. or from about 30-40 hrs. In some cases, a stimulation comprises a first stimulation prior to electroporation followed by a second stimulation after electroporation. The electroporated cells can be stimulated with beads at the previously described ratios, for example at 2:1 or 1:2.5 (beads per cell).

[0534] In some cases, target cells or modified target cells can be activated or expanded by co-culturing with tissue or cells. A cell can be an antigen presenting cell or an artificial antigen presenting cell. Antigen presenting cells (APCs) can include, but not limited to, dendritic cells, macrophages, B cells, and other non-professional APCs. An APC can express a number of immune stimulatory molecules on its surface, such as, but not limited to, B7, CD80, CD83, CD86, CD32, CD64, 4-1BBL, anti-CD3, anti-CD3 mAb, S-2-hydroxyglutarate, anti-CD28, anti-CD28 mAb, CD1d, anti-CD2, membrane-bound IL-15, membrane-bound IL-17, membrane-bound IL-21, membrane-bound IL-2, truncated CD19, derivative thereof, or any combination thereof.

[0535] An artificial antigen presenting cells (aAPCs) can express ligands for T cell receptor and costimulatory molecules and can activate and expand T cells for transfer, while improving their potency and function in some cases. An aAPC can be engineered to express any gene for T cell activation. An aAPC can be engineered to express any gene for T cell expansion. An aAPC can be a bead, a cell, a protein, an antibody, a cytokine, or any combination. An aAPC can deliver signals to a cell population that may undergo genomic transplant. For example, an aAPC can deliver a signal 1, signal, 2, signal 3 or any combination. A signal 1 can be an antigen recognition signal. For example, signal 1 can be ligation of a TCR by a peptide-MHC complex or binding of agonistic antibodies directed towards CD3 that can lead to activation of the CD3 signal-transduction complex. Signal 2 can be a co-stimulatory signal. For example, a co-stimulatory signal can be anti-CD28, inducible co-stimulator (ICOS), CD27, and 4-1BB (CD137), which bind to ICOS-L, CD70, and 4-1BBL, respectively. Signal 3 can be a cytokine signal.

[0536] An aAPC can be a bead. A spherical polystyrene bead can be coated with antibodies against CD3 and CD28 and be used for T cell activation. A bead can be of any size. In some cases, a bead can be or can be about 3 and 6 micrometers. A bead can be or can be about 4.5 micrometers in size. A bead can be utilized at any cell to bead ratio. For example, a 3 to 1 bead to cell ratio at 1 million cells per milliliter can be used. An aAPC can also be a rigid spherical particle, a polystyrene latex microbeads, a magnetic nano- or micro-particles, a nanosized quantum dot, a 4, poly(lactic-co-glycolic acid) (PLGA) microsphere, a nonspherical particle, a 5, carbon nanotube bundle, a 6, ellipsoid PLGA microparticle, a 7, nanoworms, a fluidic lipid bilayer-containing system, an 8, 2D-supported lipid bilayer (2D-SLBs), a 9, liposome, a 10, RAFTsomes/microdomain liposome, an 11, SLB particle, or any combination thereof.

[0537] In some cases, an aAPC can expand CD4 T cells. For example, an aAPC can be engineered to mimic an antigen processing and presentation pathway of HLA class II-restricted CD4 T cells. A K562 can be engineered to express HLA-D, DP α, DP β chains, Ii, DM α, DM β, CD80, CD83, or any combination thereof. For example, engineered K562 cells can be pulsed with an HLA-restricted peptide in order to expand HLA-restricted antigen-specific CD4 T cells. In some cases, the use of aAPCs can be combined with exogenously introduced cytokines for T cell activation, expansion, or any combination. Cells can also be expanded in vivo, for example in the subject's blood after administration of modified cells into a subject.

[0538] In some cases, methods and compositions provided herein can include substantially antibiotics-free cell culture media. Antibiotics, e.g., penicillin and streptomycin, can be included only in experimental cultures, possibly not in cultures of cells that are to be infused into a subject. The term “substantially antibiotics-free medium” can refer to a medium having no or almost no antibiotics therein, for instance, a medium having 0 g/ml antibiotics, or a medium having at most 1 μg/ml, at most 0.5 μg/ml, at most 0.2 μg/ml, at most 100 ng/ml, at most 50 ng/ml, at most 20 ng/ml, at most 10 ng/ml, at most 5 ng/ml, at most 2 ng/ml, at most 1 ng/ml, at most 500 μg/ml, at most 200 μg/ml, at most 100 μg/ml, at most 50 μg/ml, at most 20 μg/ml, at most 10 μg/ml, at most 5 μg/ml, at most 2 μg/ml, at most 1 μg/ml, at most 500 fg/ml, at most 200 fg/ml, at most 100 fg/ml, at most 50 fg/ml, at most 20 fg/ml, at most 10 fg/ml, or at most 1 fg/ml antibiotics.

[0539] In some cases, the immune stimulatory agent can be applied after the cell transfection. In some cases, the immune stimulatory agent can be introduced immediately after the cell transfection is completed. In some cases, the immune stimulatory agent can be introduced while the cell transfection is being conducted, for instance, applied while electroporation is being performed, or applied while the cell is still being exposed to transfection reagents. In some cases, the immune stimulatory agent can be introduced up to several minutes to several hours post-transfection. The time delay between the completion of cell transfection and application of the immune stimulatory agent can be about 30 sec, about 1 min, about 2 min, about 3 min, about 4 min, about 5 min, about 6 min, about 7 min, about 8 min, about 9 min, about 10 min, about 15 min, about 30 min, about 45 min, about 60 min, about 1.5 hrs, about 2 hrs, about 3 hrs, about 4 hrs, about 5 hrs, about 7.5 hrs, about 8 hrs, about 10 hrs, about 12 hrs, about 20 hrs, about 30 hrs, about 40 hrs, about 50 hrs, about 60 hrs, about 70 hrs, about 80 hrs, about 90 hrs, or about 1 week. In some cases, the time delay can be even longer.

[0540] In some cases, the immune stimulatory agent can be applied before the cell transfection. In certain cases, the immune stimulatory agent can be present in the cell culture through a period of time before the transfection. The immune stimulatory agent can be present both before and after the cell transfection.

[0541] The immune stimulatory agent can be supplied in the culture medium at a concentration about 20 μg/ml, 50 μg/ml, 100 μg/ml, 200 μg/ml, 300 μg/ml, 400 μg/ml, 500 μg/ml, 600 μg/ml, 700 μg/ml, 800 μg/ml, 900 μg/ml, 1 ng/ml, 2 ng/ml, 3 ng/ml, 4 ng/ml, 5 ng/ml, 6 ng/ml, 7 ng/ml, 8 ng/ml, 9 ng/ml, 10 ng/ml, 12 ng/ml, 15 ng/ml, 20 ng/ml, 25 ng/ml, 30 ng/ml, 35 ng/ml, 40 ng/ml, 45 ng/ml, 50 ng/ml, 75 ng/ml, 100 ng/ml, 200 ng/ml, 500 ng/ml, 750 ng/ml, 1 μg/ml, 5 μg/ml, 10 μg/ml, 50 μg/ml, or about a value between any two of these values. The immune stimulatory agent can be supplied in the culture medium at a concentration about 5 ng/mL. The immune stimulatory agent can be supplied in the culture medium, and the culture medium containing the immune stimulatory agent can be replaced once about every 6 hr, 12 hr, 20 hr, 21 hr, 22 hr, 23 hr, 24 hr, 26 hr, 28 hr, 30 hr, 32 hr, 34 hr, 36 hr, 40 hr, 44 hr, 48 hr, 50 hr, 60 hr. The frequent replacement of the culture medium can maintain the concentration of the immune stimulatory agent at a certain level.

[0542] As those skilled in the art would appreciate, the choice of the immune stimulatory agent, the concentration of the immune stimulatory agent, and the timing and the duration for the incubation of the immune stimulatory agent can vary depending on many parameters as discussed above.

[0543] In some cases, the cells can be treated/incubated with the immune stimulatory agent for a period of time. The incubation time can be at least about 1 min, at least about 2 min, at least about 3 min, at least about 4 min, at least about 5 min, at least about 10 min, at least about 20 min, at least about 30 min, at least about 45 min, or at least about 60 min. The incubation time can be at least about 1 hr, at least about 2 hrs, at least about 3 hrs, at least about 4 hrs, at least about 5 hrs, at least about 7.5 hrs, at least about 8 hrs, at least about 10 hrs, at least about 12 hrs, at least about 20 hrs, at least about 30 hrs, at least about 40 hrs, at least about 50 hrs, at least about 60 hrs, at least about 70 hrs, at least about 80 hrs, at least about 90 hrs, or at least about 1 week. In some cases, the incubation time can be at least 1 week, at least 2 weeks, at least 3 weeks, or even longer.

### Modulator of Double Strand Break Repair

[0544] Provided herein are methods of improving overall yield from cell engineering, including, for instance, improving cell viability after cell engineering, and/or improving transfection efficiency, comprising contacting genetically modified cells with a sufficient amount of at least one modulator of DNA double strand break repair. In some instances, contacting with a sufficient amount of at least one modulator of DNA double strand break repair for a sufficient period of time can increase cell viability. In some cases, contacting with a sufficient amount of at least one modulator of DNA double strand break repair for a period of time can increase transfection efficiency. In some instances, contacting with a sufficient amount of at least one modulator of DNA double strand break repair for a sufficient period of time can increase both cell viability and transfection efficiency.

[0545] In some cases, a modulator of DNA double strand break repair can comprise a protein involved in DNA double strand break repair. In some case, a modulator of DNA double strand break repair can comprise a chemical compound. A modulator of double strand break repair can be human, non-human, and/or synthetic. In some cases, a modulator of double strand break repair is human. In some cases, a modulator of double strand break repair is non-human. Suitable non-human sources include any one of the following, non-limiting species: rat, mouse, donkey, pig, cow, dog, cat, ferret, monkey, goat, sheep, fish, or any combination thereof.

[0546] Non-limiting examples of a protein involved in DNA double strand break repair that can be used for improving genome editing can include Ku70, Ku80, BRCA1, BRCA2, RAD51, RS-1, PALB2, Nap1, p400 ATPase, EVL, NAC, MRE11, RAD50, RAD52, RAD55, RAD57, RAD54, RAD54B, Srs2, NBS1, H2AX, PARP-1, RAD18, DNA-PKcs, XRCC4, XLF, Artemis, TdT, pol μ and pol λ, ATM, AKT1, AKT2, AKT3, Nibrin, CtIP, EXO1, BLM, E4 orf6, E1b55K, homologs and derivatives thereof, Scr7, and any combination thereof. In some cases, a protein involved in DNA double strand break repair that can be used for improving genome editing can comprise RAD51. In some cases, a protein involved in DNA double strand break repair that can be used for improving genome editing can comprise RS-1. A protein of RS-1 or RAD51 can be used. A polynucleotide encoding RS-1 or RAD-51 can also be used. An mRNA of RS-1 or RAD-51 can also be used.

[0547] In some cases, genome editing as described herein can comprise insertion of a transgene. A transgene is typically not identical to the genomic sequence where it is placed. Insertion of a transgene typically involves excision of target genomic sequence, thereby DNA double strand break. In some cases, nonhomologous end-joining (NHEJ pathway), involving proteins like Ku70 and Ku80, as well as homologous recombination pathway, involving proteins like BRCA, BRCA2 and Rad51 (HR pathway), are activated during a double strand break event in a cell. In some cases, a modulator of DNA double strand break repair as described herein can comprise a HR enhancer. A HR enhancer can promote homologous recombination mediated DNA double strand break repair. In some cases, a HR enhancer can inhibit NHEJ mediated DNA double strand break repair. In some cases, a modulator of DNA double strand break repair as described herein can comprise a NHEJ enhancer. A NHEJ enhancer can promote NHEJ mediated DNA double strand break repair. In some cases, a NHEJ enhancer can inhibit HR mediated DNA double strand break repair.

[0548] A transgene as described herein can be introduced to a genome by homologous recombination. In some cases, a transgene can be flanked by homology arms. In some cases, homology arms can comprise complementary regions that target a transgene to a desired integration site. In some cases, a donor transgene can contain a non-homologous sequence flanked by two regions of homology to allow for efficient HDR at the location of interest. Additionally, transgene sequences can comprise a vector molecule containing sequences that are not homologous to the region of interest in cellular chromatin. A transgene can contain several, discontinuous regions of homology to cellular chromatin. For example, for targeted insertion of sequences not normally present in a region of interest, a sequence can be present in a donor nucleic acid molecule and flanked by regions of homology to sequence in the region of interest.

[0549] A transgene can be flanked by homology arms where the degree of homology between the arm and its complementary sequence is sufficient to allow homologous recombination between the two. For example, the degree of homology between the arm and its complementary sequence can be 50% or greater. Two homologous non-identical sequences can be any length and their degree of non-homology can be as small as a single nucleotide (e.g., for correction of a genomic point mutation by targeted homologous recombination) or as large as 10 or more kilobases (e.g., for insertion of a gene at a predetermined ectopic site in a chromosome). Two polynucleotides comprising the homologous non-identical sequences need not be the same length. Any other gene, e.g., the genes described herein, can be used to generate a recombination arm.

[0550] A transgene can also be flanked by engineered sites that are complementary to the targeted double strand break region in a genome. In some cases, engineered sites are not homology arms. Engineered sites can have homology to a double strand break region. Engineered sites can have homology to a gene. Engineered sites can have homology to a coding genomic region. Engineered sites can have homology to a non-coding genomic region. In some cases, a transgene can be excised from a polynucleic acid so it can be inserted at a double strand break region without homologous recombination. A transgene can integrate into a double strand break without homologous recombination.

[0551] In some cases, a homologous recombination HR enhancer can be used to suppress non-homologous end-joining (NHEJ). Non-homologous end-joining can result in the loss of nucleotides at the end of double stranded breaks; non-homologous end-joining can also result in frameshift. In some cases, homology-directed repair can be a more attractive mechanism to use when knocking in genes. To suppress non-homologous end-joining, a HR enhancer can be delivered. In some cases, more than one HR enhancer can be delivered. A HR enhancer can inhibit proteins involved in non-homologous end-joining, for example, KU70, KU80, and/or DNA Ligase IV. In some cases, a Ligase IV inhibitor, such as Scr7, can be delivered. In some cases, the HR enhancer can be L755507. In some cases, a different Ligase IV inhibitor can be used. In some cases, a HR enhancer can be an adenovirus 4 protein, for example, E1B55K and/or E4 orf6. In some cases, a chemical inhibitor can be used.

[0552] Non-homologous end-joining molecules such as KU70, KU80, and/or DNA Ligase IV can be suppressed by using a variety of methods. For example, non-homologous end-joining molecules such as KU70, KU80, and/or DNA Ligase IV can be suppressed by gene silencing. For example, non-homologous end-joining molecules KU70, KU80, and/or DNA Ligase IV can be suppressed by gene silencing during transcription or translation of factors. Non-homologous end-joining molecules KU70, KU80, and/or DNA Ligase IV can also be suppressed by degradation of factors. Non-homologous end-joining molecules KU70, KU80, and/or DNA Ligase IV can be also be inhibited. Inhibitors of KU70, KU80, and/or DNA Ligase IV can comprise E1B55K and/or E4 orf6. Non-homologous end-joining molecules KU70, KU80, and/or DNA Ligase IV can also be inhibited by sequestration. Gene expression can be suppressed by knock out, altering a promoter of a gene, and/or by administering interfering RNAs directed at the factors.

[0553] In some cases, the insertion can comprise homology directed repair. In some cases, an enhancer of HR can be used, such as RS-1. RS-1 can be added to the media of a cellular culture. RS-1 can increase the efficiency of nuclease-mediated integration of an exogenous polynucleic acid into a genome. For example, RS-1 can improve the efficiency of integration of a TCR sequence into the genome of a cell by homologous recombination. RS-1 can also increase the viability of cells post cellular engineering. RS-1 protein or portion thereof can be introduced to a population of cells at a concentration from about 3 μM to about 12 μM. RS-1 protein or portion thereof can be introduced to a population of cells at a concentration from about 7 μM to about 8 μM. In some cases, RS-1 protein or portion thereof can be introduced to a population of cells at a concentration from about 3 μM, 4 μM, 5 μM, 6 μM, 7 μM, 8 μM, 9 μM, 10 μM, 11 μM, or up to about 12 μM. In some cases, a downstream factor in the RS-1 pathway may be utilized. RS-1 (3-((benzylamino) sulfonyl)-4-bromo-N-(4-bromophenyl)benzamide) can stimulate RAD51, a player in the HR complex. In some cases, modulating a RAD51-interacting factor such as PALB2 (partner and localizer of BRCA2), Nap1 (nucleosome assembly protein 1), p400 ATPase, EVL (Ena/Vasp-like) and the like may also lead to enhanced integration frequencies in nuclease-mediated gene targeting. For example, RAD51 may be introduced to a cellular culture to improve integration of an exogenous sequence into a cellular genome.

[0554] Rad51 may assist HR through a variety of methods. For example, HR can be dependent on the availability of a template, synthesized during the S-phase of the cell cycle. The breast cancer susceptibility gene (BRCA2) and Rad51, a structural and functional homolog of bacterial RecA recombinase, can be used for the error-free repair of DSB by HR. Following detection of DSB, BRCA2 recruits Rad51 to the junction of DSBs. Rad 51 protein or portion thereof can be introduced to a population of cells at a concentration from about 100 ng to about 20 μg in some cases. For example, Rad 51 can be introduced to a population of cells from about 100 ng, 200 ng, 300 ng, 400 ng, 500 ng, 600 ng, 700 ng, 800 ng, 900 ng, 1 μg, 2 μg, 3 μg, 4 μg, 5 μg, 6 μg, 7 μg, 8 μg, 9 μg, 10 μg, 11 μg, 12 μg, 13 μg, 14 μg, 15 μg, 16 μg, 17 μg, 18 μg, 19 μg, or up to about 20 μg.

[0555] In some cases, an enhancer of homologous recombination can be n-acetyl-cysteine (NAC). NAC can be a thiol-containing compound that nonenzymatically interacts with and detoxifies reactive electrophiles and free radicals. NAC can be introduced to a cellular culture in some cases. For example, NAC may be introduced prior to electroporation, during electroporation, or after an electroporation. In other cases, NAC may be cultured with cells during an expansion step. In some cases, a vector encoding NAC may be introduced to a cell. NAC can be supplied in the culture medium at a concentration about 1 μM, 5 μM, 10 μM, 20 μM, 50 μM, 75 μM, 100 μM, 200 μM, 300 μM, 400 μM, 500 μM, 600 μM, 700 μM, 800 μM, 900 μM, 1 mM, 2 mM, 3 mM, 4 mM, 5 mM, 6 mM, 7 mM, 8 mM, 9 mM, 10 mM, 12 mM, 14 mM, 15 mM, 16 mM, 18 mM, 20 mM, 22 mM, 24 mM, 25 mM, 26 mM, 28 mM, 30 mM, 35 mM, 40 mM, 45 mM, 50 mM, 75 mM, 100 mM, 200 mM, 500 mM, 750 mM, 1 M, 10 M, 100 M, or about a value between any two of these values. NAC can be supplied in the culture medium at a concentration about 10 mM.

[0556] An enhancer can be a protein involved in double strand break repair. Proteins involved in double strand break repair can be MRE11, RAD50, NBS1 (XRS2) complex, BRCA1, histone H2AX, PARP-1, RAD18, DNA-dependent protein kinase catalytic subunit (DNA-PKcs), and ATM. In some cases, an enhancer can be AKT or be involved in an AKT pathway. AKT can be involved in NHEJ-mediated double strand break repair. In some cases, AKT1 can inhibit HR by inducing the cytoplasmic translocation of Brca1 and Rad51. AKT, also known as protein kinase B (PKB), belongs to the cAMP-dependent, cGMP-dependent, protein kinase C kinase family. The AKT family can have 3 evolutionarily conserved isoforms: AKT1 (PKBα) (including 3 splice variants), AKT2 (PKBβ), and AKT3 (PKBγ) (including 2 splice variants). Growth factors and cytokines, such as IL-2, can bind to a transmembrane receptor and stimulate the activity of lipid enzyme phosphatidyl-inositol 3-kinase (PI3K) family members, which can phosphorylate phosphatidyl-inositol di-phosphate (PIP2) to generate PIP3 at the plasma membrane. PIP3 can constitute binding sites for proteins that contain a pleckstrin homology (PH) domain, such as AKT and PDK1, recruiting them to the membrane. In some cases, a PI3K family members may be introduced to a cell to enhance integration of an exogenous sequence.

[0557] In some cases, AKT can be inhibited. Inhibition of AKT by selective chemical inhibitors or AKT siRNA can restore the DNA damage-induced recruitment of RPA, CtIP, Rad51, and Chk1 activation. In some cases, blockage of growth factors, cytokines, or both, can inhibit AKT pathway. In some cases, blockage of growth factors, cytokines, or both, e.g., anti-IFNAR2 antibody (antibody against human Interferon (alpha, beta, and omega) Receptor 2), can promote HR mediated DNA double strand break repair. IFNAR2 antibody can be supplied in the culture medium at a concentration about 100 μg/ml, 500 μg/ml, 1 ng/ml, 5 ng/ml, 10 ng/ml, 20 ng/ml, 50 ng/ml, 75 ng/ml, 100 ng/ml, 200 ng/ml, 500 ng/ml, 750 ng/ml, 1 μg/ml, 2 μg/ml, 3 μg/ml, 4 μg/ml, 5 μg/ml, 6 μg/ml, 7 μg/ml, 8 μg/ml, 9 μg/ml, 10 μg/ml, 12 μg/ml, 14 μg/ml, 15 μg/ml, 16 μg/ml, 18 μg/ml, 20 μg/ml, 22 μg/ml, 25 μg/ml, 30 μg/ml, 40 μg/ml, 50 μg/ml, 60 μg/ml, 70 μg/ml, 80 μg/ml, 90 μg/ml, 1 mg/ml, 5 mg/ml, 10 mg/ml, 20 mg/ml, 50 mg/ml, 100 mg/ml, 200 mg/ml, 500 mg/ml, 1 g/ml, or about a value between any two of these values. IFNAR2 antibody can be supplied in the culture medium at a concentration about 10 μg/ml.

[0558] A HR enhancer that suppresses non-homologous end-joining can be delivered with plasmid DNA. Sometimes, the plasmid can be a double stranded DNA molecule. The plasmid molecule can also be single stranded DNA. The plasmid can also carry at least one gene. The plasmid can also carry more than one gene. At least one plasmid can also be used. More than one plasmid can also be used. A HR enhancer that suppresses non-homologous end-joining can be delivered with plasmid DNA in conjunction with CRISPR-Cas, primers, and/or a modifier compound. A modifier compound can reduce cellular toxicity of plasmid DNA and improve cellular viability. An HR enhancer and a modifier compound can be introduced to a cell before genomic engineering. The HR enhancer can be a small molecule. In some cases, the HR enhancer can be delivered to a T cell suspension. An HR enhancer can improve viability of cells transfected with double stranded DNA.

[0559] A HR enhancer that suppresses non-homologous end-joining can be delivered with an HR substrate to be integrated. A substrate can be a polynucleic acid. A polynucleic acid can comprise a TCR transgene. A polynucleic acid can be delivered as mRNA. A polynucleic acid can comprise homology arms to an endogenous region of the genome for integration of a TCR transgene. A polynucleic acid can be a vector. A vector can be inserted into another vector (e.g., viral vector) in either the sense or anti-sense orientation. Upstream of the 5′ LTR region of the viral genome a T7, T3, or other transcriptional start sequence can be placed for in vitro transcription of the viral cassette. This vector cassette can be then used as a template for in vitro transcription of mRNA. For example, when this mRNA is delivered to any cell with its cognate reverse transcription enzyme, delivered also as mRNA or protein, then the single stranded mRNA cassette can be used as a template to generate hundreds to thousands of copies in the form of double stranded DNA (dsDNA) that can be used as a HR substrate for the desired homologous recombination event to integrate a transgene cassette at an intended target site in the genome. This method can circumvent the need for delivery of toxic plasmid DNA for CRISPR mediated homologous recombination. Additionally, as each mRNA template can be made into hundreds or thousands of copies of dsDNA, the amount of homologous recombination template available within the cell can be very high. The high amount of homologous recombination template can drive the desired homologous recombination event. Further, the mRNA can also generate single stranded DNA. Single stranded DNA can also be used as a template for homologous recombination, for example with recombinant AAV (rAAV) gene targeting. mRNA can be reverse transcribed into a DNA homologous recombination HR enhancer in situ. This strategy can avoid the toxic delivery of plasmid DNA. Additionally, mRNA can amplify the homologous recombination substrate to a higher level than plasmid DNA and/or can improve the efficiency of homologous recombination. In the event that only robust reverse transcription of the single stranded DNA occurs in a cell, mRNAs encoding both the sense and anti-sense strand of the viral vector can be introduced. In this case, both mRNA strands can be reverse transcribed within the cell and/or naturally anneal to generate dsDNA.

[0560] A HR enhancer that suppresses non-homologous end-joining can be delivered as a chemical inhibitor. For example, a HR enhancer can act by interfering with Ligase IV-DNA binding. A HR enhancer can also activate the intrinsic apoptotic pathway. A HR enhancer can also be a peptide mimetic of a Ligase IV inhibitor. A HR enhancer can also be co-expressed with the Cas9 system. A HR enhancer can also be co-expressed with viral proteins, such as E1B55K and/or E4 orf6. A HR enhancer can also be SCR7, L755507, or any derivative thereof. A HR enhancer can be delivered with a compound that reduces toxicity of exogenous DNA insertion.

[0561] In some cases, a homologous recombination HR enhancer can be used to suppress non-homologous end-joining. In some cases, a homologous recombination HR enhancer can be used to promote homologous directed repair. In some cases, a homologous recombination HR enhancer can be used to promote homologous directed repair after a CRISPR-Cas double stranded break. In some cases, a homologous recombination HR enhancer can be used to promote homologous directed repair after a CRISPR-Cas double stranded break and the knock-in and knock-out of one of more genes.

[0562] Increase in HR efficiency with an HR enhancer can be or can be about 10%, 20%, 30%, 40%, 50%, 60%, 70%, 80%, 90%, or 100%. Decrease in NHEJ with an HR enhancer can be or can be about 10%, 20%, 30%, 40%, 50%, 60%, 70%, 80%, 90%, or 100%.

[0563] Contacting with modulator of DNA double strand break repair can lead to an increase in cell viability about 5%, about 10%, about 15%, about 20%, about 25%, about 30%, about 35%, about 40%, about 45%, about 50%, about 55%, about 60%, about 65%, about 70%, about 75%, about 80%, about 90%, about 100%, about 125%, about 150%, about 175%, about 200%, about 250%, about 300%, or even more. In some cases, an increase in cell viability can be from about 50% to about 200%. Contacting with modulator of DNA double strand break repair can lead to an increase in integration efficiency about 5%, about 10%, about 15%, about 20%, about 25%, about 30%, about 35%, about 40%, about 45%, about 50%, about 55%, about 60%, about 65%, about 70%, about 75%, about 80%, about 90%, about 100%, about 125%, about 150%, about 175%, about 200%, about 250%, about 300%, or even more. In some cases, an increase in integration efficiency can be from about 50% to about 200%.

[0564] In some cases, the modulator of DNA double strand break repair can be applied after the cell transfection. In some cases, the modulator of DNA double strand break repair can be introduced immediately after the cell transfection is completed. In some cases, the modulator of DNA double strand break repair can be introduced while the cell transfection is being conducted, for instance, applied while electroporation is being performed, or applied while the cell is still being exposed to transfection reagents. In some cases, the modulator of DNA double strand break repair can be introduced up to several minutes to several hours post-transfection. The time delay between the completion of cell transfection and application of the modulator of DNA double strand break repair can be about 30 sec, about 1 min, about 2 min, about 3 min, about 4 min, about 5 min, about 6 min, about 7 min, about 8 min, about 9 min, about 10 min, about 15 min, about 30 min, about 45 min, about 60 min, about 1.5 hrs, about 2 hrs, about 3 hrs, about 4 hrs, about 5 hrs, about 7.5 hrs, about 8 hrs, about 10 hrs, about 12 hrs, about 20 hrs, about 30 hrs, about 40 hrs, about 50 hrs, about 60 hrs, about 70 hrs, about 80 hrs, about 90 hrs, or about 1 week. In some cases, the time delay can be even longer.

[0565] In some cases, the modulator of DNA double strand break repair can be applied before the cell transfection. In certain cases, the modulator of DNA double strand break repair can be present in the cell culture through a period of time before the transfection. The modulator of DNA double strand break repair can be present both before and after the cell transfection.

[0566] The modulator of DNA double strand break repair can be supplied in the culture medium, and the culture medium containing the modulator of DNA double strand break repair can be replaced once about every 6 hr, 12 hr, 20 hr, 21 hr, 22 hr, 23 hr, 24 hr, 26 hr, 28 hr, 30 hr, 32 hr, 34 hr, 36 hr, 40 hr, 44 hr, 48 hr, 50 hr, 60 hr. The frequent replacement of the culture medium can maintain the concentration of the modulator of DNA double strand break repair at a certain level.

[0567] As those skilled in the art would appreciate, the choice of the modulator of DNA double strand break repair, the concentration of the modulator of DNA double strand break repair, and the timing and the duration for the incubation of the modulator of DNA double strand break repair can vary depending on many parameters as discussed above.

[0568] In some cases, the cells can be treated/incubated with the modulator of DNA double strand break repair for a period of time. The incubation time can be at least about 1 min, at least about 2 min, at least about 3 min, at least about 4 min, at least about 5 min, at least about 10 min, at least about 20 min, at least about 30 min, at least about 45 min, or at least about 60 min. The incubation time can be at least about 1 hr, at least about 2 hrs, at least about 3 hrs, at least about 4 hrs, at least about 5 hrs, at least about 7.5 hrs, at least about 8 hrs, at least about 10 hrs, at least about 12 hrs, at least about 20 hrs, at least about 30 hrs, at least about 40 hrs, at least about 50 hrs, at least about 60 hrs, at least about 70 hrs, at least about 80 hrs, at least about 90 hrs, or at least about 1 week. In some cases, the incubation time can be at least 1 week, at least 2 weeks, at least 3 weeks, or even longer.

### Minicircle and Linearized Double Stranded DNA Construct

[0569] Provided herein are methods of improving overall yield from cell engineering, including, for instance, improving cell viability after cell engineering, and/or improving transfection efficiency, comprising contacting a population of cells a minicircle vector that encodes a transgene thereby generating a population of modified cells.

[0570] Also provided herein is a method of improving overall yield from cell engineering, including, for instance, improving cell viability after cell engineering, and/or improving transfection efficiency, comprising contacting a population of cells a linearized double stranded DNA construct that encodes a transgene thereby generating a population of modified cells.

[0571] One aspect of the present disclosure provides a method of genomically editing, comprising introducing to a population of cells a minicircle vector that encodes a transgene thereby generating a population of modified cells. One aspect of the present disclosure provides a method of genomically editing, comprising introducing to a population of cells a linearized double stranded DNA construct that encodes a transgene thereby generating a population of modified cells.

[0572] In some cases, the exogenous polynucleic acid, e.g., a transgene, can be introduced to the cell in a minicircle vector. The term “minicircle” as used herein can refer to small circular plasmid derivative that is free of most, if not all, prokaryotic vector parts (e.g. control sequences and other non-functional sequences of prokaryotic origin). With wishing to be bound by a certain theory, minimizing the size of exogenous nucleic acid can reduce cell toxicity and potentially promote the integration efficiency. In some cases, a method provided herein comprising introducing to a cell a minicircle vector that encodes a transgene can increase cell viability. In some cases, a method provided herein comprising introducing to a cell a minicircle vector that encodes a transgene can increase integration efficiency.

[0573] A minicircle vector can have a size of about 1.5 kb, about 2 kb, about 2.2 kb, about 2.4 kb, about 2.6 kb, about 2.8 kb, about 3 kb, about 3.2 kb, about 3.4 kb, about 3.6 kb, about 3.8 kb, about 4 kb, about 4.2 kb, about 4.4 kb, about 4.6 kb, about 4.8 kb, about 5 kb, about 5.2 kb, about 5.4 kb, about 5.6 kb, about 5.8 kb, about 6 kb, about 6.5 kb, about 7 kb, about 8 kb, about 9 kb, about 10 kb, about 12 kb, about 25 kb, about 50 kb, or a value between any two of these numbers. Sometimes, a mini-circle as provided herein can have a size at most 2.1 kb, at most 3.1 kb, at most 4.1 kb, at most 4.5 kb, at most 5.1 kb, at most 5.5 kb, at most 6.5 kb, at most 7.5 kb, at most 8.5 kb, at most 9.5 kb, at most 11 kb, at most 13 kb, at most 15 kb, at most 30 kb, or at most 60 kb.

[0574] A minicircle vector concentration can be from about 0.5 nanograms (ng) to about 50 μg. A minicircle vector concentration can be from about 0.5 ng to about 50 μg, from about 1 ng to about 25 μg, from about 5 ng to about 10 μg, from about 10 ng to about 5 μg, from about 20 ng to about 1 μg, from about 50 ng to 500 ng, or from about 100 ng to 250 ng.

[0575] In some cases, the exogenous polynucleic acid, e.g., a transgene, can be introduced to the cell in a linearized double stranded DNA (dsDNA) construct. In some cases, a method provided herein comprising introducing to a cell a linearized dsDNA construct that encodes a transgene can increase cell viability. In some cases, a method provided herein comprising introducing to a cell a linearized dsDNA construct that encodes a transgene can increase integration efficiency.

[0576] A linearized dsDNA construct can have a size of at least 500 bp, at least 750 bp, at least 1 kb, at least 1.1 kb, at least 1.2 kb, at least 1.3 kb, at least 1.4 kb, at least 1.5 kb, at least 1.6 kb, at least 1.7 kb, at least 1.8 kb, at least 1.9 kb, at least 2 kb, or even larger size. A linearized dsDNA construct can have a size of about 500 bp, about 750 bp, about 1 kb, about 1.1 kb, about 1.2 kb, about 1.3 kb, about 1.4 kb, about 1.5 kb, about 1.6 kb, about 1.7 kb, about 1.8 kb, about 1.9 kb, or about 2 kb.

[0577] A linearized dsDNA construct concentration can be from about 0.5 nanograms (ng) to about 50 μg. A linearized dsDNA construct concentration can be from about 0.5 ng to about 50 μg, from about 1 ng to about 25 μg, from about 5 ng to about 10 μg, from about 10 ng to about 5 μg, from about 20 ng to about 1 μg, from about 50 ng to 500 ng, or from about 100 ng to 250 ng.

[0578] A minicircle vector or a double-stranded linearized construct can contain a transgene as discussed above. A minicircle or a double-stranded linearized construct can comprise any nucleotide sequence, e.g., any gene of interest. A minicircle or a double-stranded linearized construct can comprise a transgene that encodes a cellular receptor. A cellular receptor can include, but not limited to, a TCR, BCR, CAR, and any combination thereof. A minicircle or a double-stranded linearized construct can comprise a transgene that encodes a TCR as discussed above.

### Nuclease Systems

[0579] Gene editing can be performed using a nuclease, including CRISPR associated proteins (Cas proteins, e.g., Cas9), Zinc finger nuclease (ZFN), Transcription Activator-Like Effector Nuclease (TALEN), or meganucleases. Nucleases (e.g., endonucleases) can be naturally existing nucleases, genetically modified, and/or recombinant. Gene editing can also be performed using a transposon-based system (e.g. PiggyBac, Sleeping beauty). For example, gene editing can be performed using a transposase.

### CRISPR System

[0580] In some embodiments, methods described herein use a CRISPR system. There are at least five types of CRISPR systems which all incorporate RNAs and Cas proteins. Types I, III, and IV assemble a multi-Cas protein complex that is capable of cleaving nucleic acids that are complementary to the crRNA. Types I and III both require pre-crRNA processing prior to assembling the processed crRNA into the multi-Cas protein complex. Types II and V CRISPR systems comprise a single Cas protein complexed with at least one guiding RNA. Suitable nucleases include, but are not limited to, CRISPR-associated (Cas) proteins or Cas nucleases including type I CRISPR-associated (Cas) polypeptides, type II CRISPR-associated (Cas) polypeptides, type III CRISPR-associated (Cas) polypeptides, type IV CRISPR-associated (Cas) polypeptides, type V CRISPR-associated (Cas) polypeptides, and type VI CRISPR-associated (Cas) polypeptides; zinc finger nucleases (ZFN); transcription activator-like effector nucleases (TALEN); meganucleases; RNA-binding proteins (RBP); CRISPR-associated RNA binding proteins; recombinases; flippases; transposases; Argonaute proteins; any derivative thereof; any variant thereof; and any fragment thereof.

[0581] The general mechanism and recent advances of CRISPR system is discussed in Cong, L. et al., “Multiplex genome engineering using CRISPR systems,” Science, 339(6121): 819-823 (2013); Fu, Y. et al., “High-frequency off-target mutagenesis induced by CRISPR-Cas nucleases in human cells,” Nature Biotechnology, 31, 822-826 (2013); Chu, V T et al. “Increasing the efficiency of homology-directed repair for CRISPR-Cas9-induced precise gene editing in mammalian cells,” Nature Biotechnology 33, 543-548 (2015); Shmakov, S. et al., “Discovery and functional characterization of diverse Class 2 CRISPR-Cas systems,” Molecular Cell, 60, 1-13 (2015); Makarova, K S et al., “An updated evolutionary classification of CRISPR-Cas systems,”, Nature Reviews Microbiology, 13, 1-15 (2015). Site-specific cleavage of a target DNA occurs at locations determined by both 1) base-pairing complementarity between the guide RNA and the target DNA (also called a protospacer) and 2) a short motif in the target DNA referred to as the protospacer adjacent motif (PAM). For example, an engineered cell can be generated using a CRISPR system, e.g., a type II CRISPR system. A Cas enzyme used in the methods disclosed herein can be Cas9, which catalyzes DNA cleavage. Enzymatic action by Cas9 derived from Streptococcus pyogenes or any closely related Cas9 can generate double stranded breaks at target site sequences which hybridize to 20 nucleotides of a guide sequence and that have a protospacer-adjacent motif (PAM) following the 20 nucleotides of the target sequence.

### Cas Protein

[0582] A vector can be operably linked to an enzyme-coding sequence encoding a CRISPR enzyme, such as a Cas protein (CRISPR-associated protein). Non-limiting examples of Cas proteins include, but are not limited to, Cas1, Cas1B, Cas2, Cas3, Cas4, Cas5, Cas6, Cas7, Cas8, Cas9 (also known as Csn1 or Csx12), Cas10, Csy1, Csy2, Csy3, Cse1, Cse2, Csc1, Csc2, Csa5, Csn2, Csm2, Csm3, Csm4, Csm5, Csm6, Cmr1, Cmr3, Cmr4, Cmr5, Cmr6, Csb1, Csb2, Csb3, Csx17, Csx14, Csx10, Csx16, CsaX, Csx3, Csx1, Csx1S, Csf1, Csf2, CsO, Csf4, Cpf1, c2c1, c2c3, Cas9HiFi, homologues thereof, or modified versions thereof. In some embodiments, the Cas enzyme is unmodified. In some embodiments, the CRISPR enzyme directs cleavage of one or both strands at a target sequence, such as within a target sequence and/or within a complement of a target sequence. For example, a CRISPR enzyme can direct cleavage of one or both strands within or within about 1, 2, 3, 4, 5, 6, 7, 8, 9, 10, 15, 20, 25, 50, 100, 200, 500, or more base pairs from the first or last nucleotide of a target sequence. In some embodiments, the CRISPR enzyme is mutated with respect to a corresponding wild-type enzyme such that the mutated CRISPR enzyme lacks the ability to cleave one or both strands of a target polynucleotide containing a target sequence can be used. In some embodiments, the Cas protein is a high fidelity cas protein such as Cas9HiFi.

[0583] Cas9 refers to the wild type or a modified form of the Cas9 protein that can comprise an amino acid change such as a deletion, insertion, substitution, variant, mutation, fusion, chimera, or any combination thereof. In some embodiments, a polynucleotide encoding an endonuclease (e.g., a Cas protein such as Cas9) is codon optimized for expression in particular cells, such as eukaryotic cells. This type of optimization can entail the mutation of foreign-derived (e.g., recombinant) DNA to mimic the codon preferences of the intended host organism or cell while encoding the same protein. In some embodiments, an endonuclease comprises an amino acid sequence having at least or at least about 50%, 60%, 70%, 75%, 80%, 85%, 90%, 95%, 99%, or 100%, amino acid sequence identity to the nuclease domain of a wild type exemplary site-directed polypeptide (e.g., Cas9 from S. pyogenes).

[0584] Any functional concentration of Cas protein can be introduced to a cell. For example, 15 micrograms of Cas mRNA can be introduced to a cell. In other cases, a Cas mRNA can be introduced from 0.5 micrograms to 100 micrograms. A Cas mRNA can be introduced from 0.5, 5, 10, 15, 20, 25, 30, 35, 40, 45, 50, 55, 60, 65, 70, 75, 80, 85, 90, 95, or 100 micrograms.

[0585] In some embodiments, a vector that encodes a CRISPR enzyme comprises one or more nuclear localization sequences (NLSs), such as more than or more than about 1, 2, 3, 4, 5, 6, 7, 8, 9, 10, NLSs can be used. For example, a CRISPR enzyme can comprise more than or more than about 1, 2, 3, 4, 5, 6, 7, 8, 9, 10, NLSs at or near the ammo-terminus, more than or more than about 1, 2, 3, 4, 5, 6, 7, 8, 9, 10, NLSs at or near the carboxyl-terminus, or any combination of these (e.g., one or more NLS at the ammo-terminus and one or more NLS at the carboxyl terminus). When more than one NLS is present, each can be selected independently of others, such that a single NLS can be present in more than one copy and/or in combination with one or more other NLSs present in one or more copies. In some embodiments, CRISPR enzymes used in the methods comprise NLSs. The NLS can be located anywhere within the polypeptide chain, e.g., near the N- or C-terminus. For example, the NLS can be within or within about 1, 2, 3, 4, 5, 10, 15, 20, 25, 30, 40, 50 amino acids along a polypeptide chain from the N- or C-terminus. Sometimes the NLS can be within or within about 50 amino acids or more, e.g., 100, 200, 300, 400, 500, 600, 700, 800, 900, or 1000 amino acids from the N- or C-terminus.

[0586] Non-limiting examples of NLSs include an NLS sequence derived from: the NLS of the SV40 virus large T-antigen, having the amino acid sequence PKKKRKV (SEQ ID NO: 2); the NLS from nucleoplasmin (e.g. the nucleoplasmin bipartite NLS with the sequence KRPAATKKAGQAKKKK (SEQ ID NO: 63)); the c-myc NLS having the amino acid sequence PAAKRVKLD (SEQ ID NO: 64) or RQRRNELKRSP (SEQ ID NO: 65); the hRNPA1 M9 NLS having the sequence NQSSNFGPMKGGNFGGRSSGPYGGGGQYFAKPRNQGGY (SEQ ID NO: 66); the sequence RMRIZFKNKGKDTAELRRRRVEVSVELRKAKKDEQILKRRNV (SEQ ID NO: 67) of the IBB domain from importin-alpha; the sequences VSRKRPRP (SEQ ID NO: 68) and PPKKARED (SEQ ID NO: 69) of the myoma T protein; the sequence PQPKKKPL (SEQ ID NO: 70) of human p53; the sequence SALIKKKKKMAP (SEQ ID NO: 71) of mouse c-abl IV; the sequences DRLRR (SEQ ID NO: 72) and PKQKKRK (SEQ ID NO: 73) of the influenza virus NS1; the sequence RKLKKKIKKL (SEQ ID NO: 74) of the Hepatitis virus delta antigen; the sequence REKKKFLKRR (SEQ ID NO: 75) of the mouse M×1 protein; the sequence KRKGDEVDGVDEVAKKKSKK (SEQ ID NO: 76) of the human poly(ADP-ribose) polymerase; and the sequence RKCLQAGMNLEARKTKK (SEQ ID NO: 77) of the steroid hormone receptors (human) glucocorticoid.

### Guide RNA

[0587] As used herein, the term “guide RNA (gRNA)”, and its grammatical equivalents refers to a RNA which can be specific for a target DNA and can form a complex with a Cas protein. A guide RNA can comprise a guide sequence, or spacer sequence, that specifies a target site and guides a RNA/Cas complex to a specified target DNA for cleavage. Site-specific cleavage of a target DNA occurs at locations determined by both 1) base-pairing complementarity between a guide RNA and a target DNA (also called a protospacer) and 2) a short motif in a target DNA referred to as a protospacer adjacent motif (PAM).

[0588] The methods disclosed herein can comprise introducing into a cell or embryo at least one guide RNA or nucleic acid, e.g., DNA encoding at least one guide RNA. A guide RNA can interact with a RNA-guided endonuclease to direct the endonuclease to a specific target site, at which site the 5′ end of the guide RNA base pairs with a specific protospacer sequence in a chromosomal sequence.

[0589] In some embodiments, a guide RNA comprises two RNAs, e.g., CRISPR RNA (crRNA) and transactivating crRNA (tracrRNA). In some embodiments, a guide RNA comprises a single-guide RNA (sgRNA) formed by fusion of a portion (e.g., a functional portion) of crRNA and tracrRNA. A guide RNA can also be a dual RNA comprising a crRNA and a tracrRNA. A guide RNA can comprise a crRNA and lack a tracrRNA. Furthermore, a crRNA can hybridize with a target DNA or protospacer sequence.

[0590] As discussed above, a guide RNA can be an expression product. For example, a DNA that encodes a guide RNA can be a vector comprising a sequence coding for the guide RNA. A guide RNA can be transferred into a cell or organism by transfecting the cell or organism with an isolated guide RNA or plasmid DNA comprising a sequence coding for the guide RNA and a promoter. A guide RNA can also be transferred into a cell or organism in other way, such as using virus-mediated gene delivery.

[0591] A guide RNA can be isolated. For example, a guide RNA can be transfected in the form of an isolated RNA into a cell or organism. A guide RNA can be prepared by in vitro transcription using any in vitro transcription system. A guide RNA can be transferred to a cell in the form of isolated RNA rather than in the form of plasmid comprising encoding sequence for a guide RNA.

[0592] In some embodiments, the guide RNA comprises a DNA-targeting segment and a protein binding segment. A DNA-targeting segment (or DNA-targeting sequence, or spacer sequence) comprises a nucleotide sequence that can be complementary to a specific sequence within a target DNA (e.g., a protospacer). A protein-binding segment (or protein-binding sequence) can interact with a site-directed modifying polypeptide, e.g. an RNA-guided endonuclease such as a Cas protein. By “segment” it is meant a segment/section/region of a molecule, e.g., a contiguous stretch of nucleotides in an RNA. A segment can also mean a region/section of a complex such that a segment may comprise regions of more than one molecule. For example, in some cases a protein-binding segment of a DNA-targeting RNA is one RNA molecule and the protein-binding segment therefore comprises a region of that RNA molecule. In other cases, the protein-binding segment of a DNA-targeting RNA comprises two separate molecules that are hybridized along a region of complementarity.

[0593] In some embodiments, the guide RNA comprises two separate RNA molecules or a single RNA molecule. An exemplary single molecule guide RNA comprises both a DNA-targeting segment and a protein-binding segment.

[0594] An exemplary two-molecule DNA-targeting RNA can comprise a crRNA-like (“CRISPR RNA” or “targeter-RNA” or “crRNA” or “crRNA repeat”) molecule and a corresponding tracrRNA-like (“trans-acting CRISPR RNA” or “activator-RNA” or “tracrRNA”) molecule. A first RNA molecule can be a crRNA-like molecule (targeter-RNA), that can comprise a DNA-targeting segment (e.g., spacer) and a stretch of nucleotides that can form one half of a double-stranded RNA (dsRNA) duplex comprising the protein-binding segment of a guide RNA. A second RNA molecule can be a corresponding tracrRNA-like molecule (activator-RNA) that can comprise a stretch of nucleotides that can form the other half of a dsRNA duplex of a protein-binding segment of a guide RNA. In other words, a stretch of nucleotides of a crRNA-like molecule can be complementary to and can hybridize with a stretch of nucleotides of a tracrRNA-like molecule to form a dsRNA duplex of a protein-binding domain of a guide RNA. As such, each crRNA-like molecule can be said to have a corresponding tracrRNA-like molecule. A crRNA-like molecule additionally can provide a single stranded DNA-targeting segment, or spacer sequence. Thus, a crRNA-like and a tracrRNA-like molecule (as a corresponding pair) can hybridize to form a guide RNA. A subject two-molecule guide RNA can comprise any corresponding crRNA and tracrRNA pair.

[0595] In some embodiments, the DNA-targeting segment or spacer sequence of a guide RNA is complementary to sequence at a target site in a chromosomal sequence, e.g., protospacer sequence) such that the DNA-targeting segment of the guide RNA can base pair with the target site or protospacer. In some cases, a DNA-targeting segment of a guide RNA comprises from or from about 10 nucleotides to from or from about 25 nucleotides or more. For example, a region of base pairing between a first region of a guide RNA and a target site in a chromosomal sequence can be or can be about 10, 11, 12, 13, 14, 15, 16, 17, 18, 19, 20, 22, 23, 24, 25, or more than 25 nucleotides in length. In some embodiments, a first region of a guide RNA is about 19, 20, or 21 nucleotides in length.

[0596] In some embodiments, a guide RNA targets a nucleic acid sequence of or of about 20 nucleotides. A target nucleic acid can be less than or less than about 20 nucleotides. A target nucleic acid can be at least or at least about 5, 10, 15, 16, 17, 18, 19, 20, 21, 22, 23, 24, 25, 30 or more nucleotides. A target nucleic acid can be at most or at most about 5, 10, 15, 16, 17, 18, 19, 20, 21, 22, 23, 24, 25, 30 or more nucleotides. A target nucleic acid sequence can be or can be about 20 bases immediately 5′ of the first nucleotide of the PAM. A guide RNA can target the nucleic acid sequence.

[0597] A guide nucleic acid, for example, a guide RNA, can refer to a nucleic acid that can hybridize to another nucleic acid, for example, the target nucleic acid or protospacer in a genome of a cell. A guide nucleic acid can be RNA. A guide nucleic acid can be DNA. The guide nucleic acid can be programmed or designed to bind to a sequence of nucleic acid site-specifically. A guide nucleic acid can comprise a polynucleotide chain and can be called a single guide nucleic acid. A guide nucleic acid can comprise two polynucleotide chains and can be called a double guide nucleic acid.

[0598] A guide nucleic acid can hybridize to a genomic site, such as an endogenous gene provided in Table 1. In other cases, a guide nucleic acid can hybridize to a construct that comprises an insert transgene, for example as exemplified in FIG. 1A-FIG. 1C. In some aspects, a guide nucleic acid hybridizes to a sequence that is non-human. For example, in cases where a guide nucleic acid hybridizes to a construct that comprises an insert it may be specific to a non-human sequence such as a xenogeneic sequence or a synthetic sequence. In some cases, a non-human sequence is xenogeneic. Xenogeneic sequences can be obtained from any non-human sources, including but not limited to, fish, cow, cat, goat, monkey, pig, dog, horse, sheep, bird, ferret, hamster, rabbit, snake, or combinations thereof. In some cases, a xenogeneic sequence is from a fish and the fish is a zebrafish.

[0599] In other cases, to simplify targeting construct design and/or allow for consistent, reproducible liberation of a donor transgene cargo in vivo by a CRISPR nuclease, for example Cas9, a universal guide RNA sequence, UgRNA can be utilized and described in Wierson et al., 2019. In some cases, a universal guide can comprise optimal base composition using CRISPRScan for example as provided in Moreno-Mateos et al., 2015. An exemplary universal UgRNA may not comprise predicted targets in a xenogeneic genome such as the zebra-fish, pig, or human genome. When utilized a universal guide can show efficient double strand break induction and homology mediated repair at a target site, for example of a guide polynucleic acid and/or in a fluorescent reporter integrated into the zebrafish noto gene (Wierson et al., 2019a).

[0600] A guide nucleic acid can comprise one or more modifications to provide a nucleic acid with a new or enhanced feature. A guide nucleic acid can comprise a nucleic acid affinity tag. A guide nucleic acid can comprise synthetic nucleotide, synthetic nucleotide analog, nucleotide derivatives, and/or modified nucleotides.

[0601] A guide nucleic acid can comprise a nucleotide sequence (e.g., a spacer), for example, at or near the 5′ end or 3′ end, that can hybridize to a sequence in a target nucleic acid (e.g., a protospacer). A spacer of a guide nucleic acid can interact with a target nucleic acid in a sequence-specific manner via hybridization (i.e., base pairing). A spacer sequence can hybridize to a target nucleic acid that is located 5′ or 3′ of a protospacer adjacent motif (PAM). The length of a spacer sequence can be at least or at least about 5, 10, 15, 16, 17, 18, 19, 20, 21, 22, 23, 24, 25, 30 or more nucleotides. The length of a spacer sequence can be at most or at most about 5, 10, 15, 16, 17, 18, 19, 20, 21, 22, 23, 24, 25, 30 or more nucleotides.

[0602] A guide RNA can also comprise a dsRNA duplex region that forms a secondary structure. For example, a secondary structure formed by a guide RNA can comprise a stem (or hairpin) and a loop. A length of a loop and a stem can vary. For example, a loop can range from about 3 to about 10 nucleotides in length, and a stem can range from about 6 to about 20 base pairs in length. A stem can comprise one or more bulges of 1 to about 10 nucleotides. The overall length of a second region can range from about 16 to about 60 nucleotides in length. For example, a loop can be or can be about 4 nucleotides in length and a stem can be or can be about 12 base pairs. A dsRNA duplex region can comprise a protein-binding segment that can form a complex with an RNA-binding protein, such as an RNA-guided endonuclease, e.g. Cas protein.

[0603] A guide RNA can also comprise a tail region at the 5′ or 3′ end that can be essentially single-stranded. For example, a tail region is sometimes not complementarity to any chromosomal sequence in a cell of interest and is sometimes not complementarity to the rest of a guide RNA. Further, the length of a tail region can vary. A tail region can be more than or more than about 4 nucleotides in length. For example, the length of a tail region can range from or from about 5 to from or from about 60 nucleotides in length.

[0604] A guide RNA can be introduced into a cell or embryo as an RNA molecule. For example, an RNA molecule can be transcribed in vitro and/or can be chemically synthesized. A guide RNA can then be introduced into a cell or embryo as an RNA molecule. A guide RNA can also be introduced into a cell or embryo in the form of a non-RNA nucleic acid molecule, e.g., DNA molecule. For example, a DNA encoding a guide RNA can be operably linked to promoter control sequence for expression of the guide RNA in a cell or embryo of interest. An RNA coding sequence can be operably linked to a promoter sequence that is recognized by RNA polymerase III (Pol III).

[0605] A DNA molecule encoding a guide RNA can also be linear. A DNA molecule encoding a guide RNA can also be circular. A DNA sequence encoding a guide RNA can also be part of a vector. Some examples of vectors can include plasmid vectors, phagemids, cosmids, artificial/mini-chromosomes, transposons, and viral vectors. For example, a DNA encoding an RNA-guided endonuclease is present in a plasmid vector. Other non-limiting examples of suitable plasmid vectors include pUC, pBR322, pET, pBluescript, and variants thereof. Further, a vector can comprise additional expression control sequences (e.g., enhancer sequences, Kozak sequences, polyadenylation sequences, transcriptional termination sequences, etc.), selectable marker sequences (e.g., antibiotic resistance genes), origins of replication, and the like.

[0606] When both a RNA-guided endonuclease and a guide RNA are introduced into a cell as DNA molecules, each can be part of a separate molecule (e.g., one vector containing fusion protein coding sequence and a second vector containing guide RNA coding sequence) or both can be part of a same molecule (e.g., one vector containing coding (and regulatory) sequence for both a fusion protein and a guide RNA).

[0607] A Cas protein, such as a Cas9 protein or any derivative thereof, can be pre-complexed with a guide RNA to form a ribonucleoprotein (RNP) complex. The RNP complex can be introduced into primary immune cells. Introduction of the RNP complex can be timed. The cell can be synchronized with other cells at GI, S, and/or M phases of the cell cycle. The RNP complex can be delivered at a cell phase such that HDR is enhanced. The RNP complex can facilitate homology directed repair.

[0608] A guide RNA can also be modified. The modifications can comprise chemical alterations, synthetic modifications, nucleotide additions, and/or nucleotide subtractions. The modifications can also enhance CRISPR genome engineering. A modification can alter chirality of a gRNA. In some cases, chirality may be uniform or stereopure after a modification. A guide RNA can be synthesized. The synthesized guide RNA can enhance CRISPR genome engineering. A guide RNA can also be truncated. Truncation can be used to reduce undesired off-target mutagenesis. The truncation can comprise any number of nucleotide deletions. For example, the truncation can comprise 1, 2, 3, 4, 5, 10, 15, 20, 25, 30, 40, 50 or more nucleotides. A guide RNA can comprise a region of target complementarity of any length. For example, a region of target complementarity can be less than 20 nucleotides in length. A region of target complementarity can be more than 20 nucleotides in length.

[0609] In some cases, a modification is on a 5′ end, a 3′ end, from a 5′ end to a 3′ end, a single base modification, a 2′-ribose modification, or any combination thereof. A modification can be selected from a group consisting of base substitutions, insertions, deletions, chemical modifications, physical modifications, stabilization, purification, and any combination thereof.

[0610] In some cases, a modification is a chemical modification. A modification can be selected from 5′ adenylate, 5′ guanosine-triphosphate cap, 5′N7-Methylguanosine-triphosphate cap, 5′ triphosphate cap, 3′ phosphate, 3′ thiophosphate, 5′ phosphate, 5′ thiophosphate, Cis-Syn thymidine dimer, trimers, C12 spacer, C3 spacer, C6 spacer, dSpacer, PC spacer, rSpacer, Spacer 18, Spacer 9,3′-3′ modifications, 5′-5′ modifications, abasic, acridine, azobenzene, biotin, biotin BB, biotin TEG, cholesteryl TEG, desthiobiotin TEG, DNP TEG, DNP-X, DOTA, dT-Biotin, dual biotin, PC biotin, psoralen C2, psoralen C6, TINA, 3′DABCYL, black hole quencher 1, black hole quencer 2, DABCYL SE, dT-DABCYL, IRDye QC-1, QSY-21, QSY-35, QSY-7, QSY-9, carboxyl linker, thiol linkers, 2′deoxyribonucleoside analog purine, 2′deoxyribonucleoside analog pyrimidine, ribonucleoside analog, 2′-O-methyl ribonucleoside analog, sugar modified analogs, wobble/universal bases, fluorescent dye label, 2′fluoro RNA, 2′O-methyl RNA, methylphosphonate, phosphodiester DNA, phosphodiester RNA, phosphothioate DNA, phosphorothioate RNA, UNA, pseudouridine-5′-triphosphate, 5-methylcytidine-5′-triphosphate, 2-O-methyl 3 phosphorothioate or any combinations thereof.

[0611] In some cases, a modification is a 2-O-methyl 3 phosphorothioate addition. A 2-O-methyl 3 phosphorothioate addition can be performed from 1 base to 150 bases. A 2-O-methyl 3 phosphorothioate addition can be performed from 1 base to 4 bases. A 2-O-methyl 3 phosphorothioate addition can be performed on 2 bases. A 2-O-methyl 3 phosphorothioate addition can be performed on 4 bases. A modification can also be a truncation. A truncation can be a 5-base truncation.

[0612] In some cases, a dual nickase approach may be used to introduce a double stranded break. Cas proteins can be mutated at known amino acids within either nuclease domains, thereby deleting activity of one nuclease domain and generating a nickase Cas protein capable of generating a single strand break. A nickase along with two distinct guide RNAs targeting opposite strands may be utilized to generate a DSB within a target site (often referred to as a “double nick” or “dual nickase” CRISPR system). This approach may dramatically increase target specificity, since it is unlikely that two off-target nicks will be generated within close enough proximity to cause a DSB.

[0613] A gRNA can be introduced at any functional concentration. For example, a gRNA can be introduced to a cell at 10 micrograms. In other cases, a gRNA can be introduced from 0.5 micrograms to 100 micrograms. A gRNA can be introduced from 0.5, 5, 10, 15, 20, 25, 30, 35, 40, 45, 50, 55, 60, 65, 70, 75, 80, 85, 90, 95, or 100 micrograms.

[0614] In some cases, a GUIDE-Seq analysis can be performed to determine the specificity of engineered guide RNAs. The general mechanism and protocol of GUIDE-Seq profiling of off-target cleavage by CRISPR system nucleases is discussed in Tsai, S. et al., “GUIDE-Seq enables genome-wide profiling of off-target cleavage by CRISPR system nucleases,” Nature, 33: 187-197 (2015).

[0615] In some cases, one or more guides are introduced into a cell. In other cases, two or more guides are introduced into a cell. The two or more guide nucleic acids can be simultaneously present on the same expression vector or introduced as naked guides. The two or more guide nucleic acids can be under the same transcriptional control. In some embodiments, two or more (e.g., 3 or more, 4 or more, 5 or more, 10 or more, 15 or more, 20 or more, 25 or more, 30 or more, 35 or more, 40 or more, 45 or more, or 50 or more) guide nucleic acids are simultaneously expressed in a target cell (from the same or different vectors). In some cases, guide nucleic acids can be differently recognized by dead Cas proteins (e.g., dCas9 proteins from different bacteria, such as S. pyogenes, S. aureus, S. thermophilus, L. innocua, and N. meningitides).

### Inhibition of Non-Homologous Recombination

[0616] Non-homologous end-joining molecules such as KU70, KU80, and/or DNA Ligase IV can be suppressed by using a variety of methods. For example, non-homologous end-joining molecules such as KU70, KU80, and/or DNA Ligase IV can be suppressed by gene silencing (e.g., during transcription or translation). Non-homologous end-joining molecules KU70, KU80, and/or DNA Ligase IV can also be suppressed by degradation of the protein. Non-homologous end-joining molecules KU70, KU80, and/or DNA Ligase IV can be also be inhibited. Inhibitors of KU70, KU80, and/or DNA Ligase IV can comprise E1B55K and/or E4 orf6. Non-homologous end-joining molecules KU70, KU80, and/or DNA Ligase IV can also be inhibited by sequestration. An agent that suppresses non-homologous end-joining can be a small molecule.

### Delivery Systems

[0617] Conventional viral and non-viral based gene transfer methods can be used to introduce nucleic acids encoding an endonuclease (e.g., CRISPR, TALEN, transposon-based, ZEN, meganuclease, or Mega-TAL molecules), a polynucleic acid construct (e.g., comprising an insert sequence), and gRNAs, to cells in vitro, ex vivo, or in vivo.

[0618] Exemplary viral vector delivery systems include DNA and RNA viruses, which have either episomal or integrated genomes after delivery to the cell. Viral vectors can be introduced into a cell using transduction methods known to the person of ordinary skill in the art. Exemplary non-viral vector delivery systems include DNA plasmids, mini-circle DNA, naked nucleic acid, mRNA, and nucleic acid complexed with a delivery vehicle such as a liposome or poloxamer.

[0619] Methods of non-viral delivery of nucleic acids include electroporation, lipofection, nucleofection, gold nanoparticle delivery, microinjection, biolistics, virosomes, liposomes, immunoliposomes, polycation or lipid: nucleic acid conjugates, naked DNA, mRNA, artificial virions, and agent-enhanced uptake of DNA. Additional exemplary nucleic acid delivery systems include those provided by AMAXA® Biosystems (Cologne, Germany), Life Technologies (Frederick, Md.), MAXCYTE, Inc. (Rockville, Md.), BTX Molecular Delivery Systems (Holliston, Mass.) and Copernicus Therapeutics Inc. (see for example U.S. Pat. No. 6,008,336). Lipofection reagents are sold commercially (e.g., TRANSFECTAM® and LIPOFECTIN®), sonoporation using, e.g., the Sonitron 2000 system (Rich-Mar).

[0620] In some embodiments, the endonuclease is introduced into a cell using an mRNA molecule encoding said endonuclease. In some embodiments, the endonuclease is introduced into a cell using a viral vector. In some embodiments, the gRNA is introduced into a cell using a synthetic RNA molecule. In some embodiments, the polynucleic acid construct is introduced into the cell using a DNA plasmid. In some embodiments, the polynucleic acid construct is introduced into the cell using a minicircle DNA plasmid. In some embodiments, the polynucleic acid construct is introduced into the cell using a viral vector. In some embodiments, the polynucleic acid construct is introduced into the cell using an AAV vector.

[0621] In some cases, a polynucleic acid construct described herein is introduced into a cell for via RNA, e.g., messenger RNA (mRNA). In some embodiments, the mRNA polynucleic acid can be introduced into a cell with a reverse transcriptase (RT) (either in protein form or a polynucleic acid encoding for a RT). Exemplary RT include, but are not limited to, those derived from Avian Myeloblastosis Virus Reverse Transcriptase (AMV RT), Moloney murine leukemia virus (M-MLV RT), human immunodeficiency virus (HIV) reverse transcriptase (RT), derivatives thereof or combinations thereof. Once transfected, a reverse transcriptase may transcribe the engineered mRNA polynucleic acid into a double strand DNA (dsNDA). A reverse transcriptase (RT) can be an enzyme used to generate complementary DNA (cDNA) from an RNA template. In some cases, an RT enzyme can synthesize a complementary DNA strand initiating from a primer using RNA (cDNA synthesis) or single-stranded DNA as a template.

### Electroporation Schemes

[0622] Provided herein are methods of improving overall yield from cell engineering, including, for instance, improving cell viability after cell engineering, and/or improving transfection efficiency. One aspect of the present disclosure provides a method of genomically editing, comprising a first electroporation step and a second electroporation step. In some instances, a sequential electroporation scheme as provided herein can increase cell viability. In some cases, a sequential electroporation scheme as provided herein can increase transfection efficiency. In some instances, a sequential electroporation scheme as provided herein can increase both cell viability and transfection efficiency.

[0623] In some case, A first electroporation step can comprise introducing a guided-nuclease into the cells. A second electroporation step can comprise introducing into the cells a guide polynucleic acid comprising a region complementary to at least a portion of a gene. A second electroporation step can further comprise introducing into the cells an exogenous polynucleic acid. A method can generate modified cells. A first electroporation can be performed at any time. In some cases, an electroporation is performed after stimulation, such as with anti-CD3 and/or anti-CD28. Any number of cytokines or interleukins can also be used in combination with the anti-CD3 or anti-CD28 for stimulation. Electroporation can be performed from about 0 hr., 2 hr., 4 hr., 6 hr., 8 hr., 10 hr., 12 hr., 14 hr., 16 hr., 18 hr., 20 hr., 22 hr., 24 hr., 26 hr., 28 hr., 30 hr., 32 hr., 34 hr., 36 hr., 38 hr., 40 hr., 42 hr., 44 hr., 46 hr., 48 hr., 50 hr., 52 hr., 54 hr., 56 hr., 58 hr., 60 hr., 62 hr., 64 hr., 66 hr., 68 hr., 70 hr., 72 hr., 74 hr., 76 hr., 78 hr., 80 hr., 82 hr., 84 hr., 86 hr., 88 hr., 90 hr., 92 hr., 94 hr., 96 hr., 98 hr., or up to about 100 hrs after an electroporation. In some cases, an electroporation is performed from about 30 hrs.-40 hrs. after stimulation. In some cases, an electroporation is performed at 36 hrs. post stimulation. In some cases, transfection is timed based on the S-phase of a cellular population, see for example, FIG. 29A and FIG. 29B showing expression levels of various DNA sensors as a function of hours post stimulation.

[0624] In some cases, a first electroporation step can comprise introducing a guided-ribonucleoprotein complex into the cells. A second electroporation step can comprise introducing into the cells an exogenous polynucleic acid. A method can generate modified cells.

[0625] A method provided herein can comprise sequential electroporation of the cells to be modified. In some cases, a method can comprise a first electroporation step and a second electroporation step. In some cases, the first and second electroporation steps are conducted with an interval. The interval between the first and second electroporation steps can be from about 10 min to about 48 hr, from about 30 min to about 44 hr, from about 1 hr to about 40 hr, from about 2 hr to about 36 hr, from 3 hr to about 32 hr, from about 4 hr to about 30 hr, from about 5 hr to about 28 hr, from about 5.5 hr to about 26 hr, from about 6 hr to about 24 hr, from about 6.5 hr to about 22 hr, from about 7 hr to about 20 hr, from about 8 hr to about 16 hr, from about 9 hr to about 12 hr, or from about 10 to about 11 hr. In some cases, the interval between the first and second electroporation steps can be about 6 hr, about 7 hr, about 8 hr, about 9 hr, about 10 hr, about 11 hr, about 12 hr, about 13 hr, about 14 hr, about 15 hr, about 16 hr, about 17 hr, about 18 hr, about 19 hr, about 20 hr, about 21 hr, about 22 hr, about 23 hr, or about 24 hr.

[0626] An interval between the first and second electroporation steps can be beneficial to the cell viability. A method comprising a first and a second electroporation steps as provided herein can promote an increase in a percentage of viability as compared to comparable cells comprising a single electroporation consisting of both first and second electroporation steps. An increase in viability percentage can be about 5%, about 10%, about 15%, about 20%, about 25%, about 30%, about 35%, about 40%, about 45%, about 50%, about 55%, about 60%, about 65%, about 70%, about 75%, about 80%, about 90%, about 100%, about 125%, about 150%, about 175%, about 200%, about 250%, about 300%, or even more. In some cases, an increase in viability percentage can be from about 50% to about 200%.

[0627] An interval between the first and second electroporation steps can be beneficial to the transgene integration efficiency. A method comprising a first and a second electroporation steps as provided herein can promote an increase in a percentage of integration efficiency as compared to comparable cells comprising a single electroporation consisting of both first and second electroporation steps. An increase in integration efficiency can be about 5%, about 10%, about 15%, about 20%, about 25%, about 30%, about 35%, about 40%, about 45%, about 50%, about 55%, about 60%, about 65%, about 70%, about 75%, about 80%, about 90%, about 100%, about 125%, about 150%, about 175%, about 200%, about 250%, about 300%, or even more. In some cases, an increase in integration efficiency can be from about 50% to about 200%.

[0628] A first electroporation step can comprise introducing to the cells a guided-nuclease. As provided herein, a guided-nuclease can comprise CRISPR associated proteins (Cas proteins, e.g., Cas9), Zinc finger nuclease (ZFN), Transcription Activator-Like Effector Nuclease (TALEN), transposases, and meganucleases. Guided-nucleases can be naturally existing nucleases, genetically modified, and/or recombinant. Guided-nucleases can be introduced to the target cell in any form that may result in functional presence of the guided-nucleases inside the cell. In some cases, the guided-nucleases can be transfected into the cells in the form of a DNA. In some cases, the guided-nucleases can be transfected in the form of an mRNA. In some cases, the guided-nucleases can be delivered into the cells in the form of a protein or protein complex. In some cases, a guided-nuclease can comprise a Cas protein. Non-limiting examples of Cas protein that can be used for the method provided herein included Cas1, Cas1B, Cas2, Cas3, Cas4, Cas5, Cas6, Cas7, Cas8, Cas9 (also known as Csn1 or Csx12), Cas10, Csy1, Csy2, Csy3, Cse1, Cse2, Csc1, Csc2, Csa5, Csn2, Csm2, Csm3, Csm4, Csm5, Csm6, Cmr1, Cmr3, Cmr4, Cmr5, Cmr6, Csb1, Csb2, Csb3, Csx17, Csx14, Csx10, Csx16, CsaX, Csx3, Csx1, Csx1S, Csf1, Csf2, CsO, Csf4, Cpf1, c2c1, c2c3, Cas9HiFi, homologues thereof, or modified versions thereof.

[0629] A second electroporation step can comprise introducing to the cells a guide polynucleic acid comprising a region complementary to at least a portion of a gene. A second electroporation step can comprise introducing to the cells an exogenous polynucleic acid. A second electroporation step can comprise introducing to the cells a guide polynucleic acid comprising a region complementary to at least a portion a gene and an exogenous polynucleic acid. In some cases, the guide polynucleic acid comprising a region complementary to at least a portion of a gene can comprise a guide RNA as used in CRISPR system. A guide RNA can comprise a crRNA and a tracrRNA. In some cases, the guide polynucleic acid comprising a region complementary to at least a portion of a gene and the exogenous polynucleic acid can be present on a single polynucleotide molecule, for instance, on a single DNA plasmid.

[0630] An exogenous polynucleic acid that can be used for a method provided herein can comprise any nucleotide sequence. In some cases, an exogenous polynucleic acid can comprise a transgene. A transgene can be any gene or derivative thereof. In some cases, a transgene can comprise a cellular receptor, such as, a T cell receptor (TCR), a B cell receptor (BCR), a chimeric antigen receptor (CAR), or a combination thereof.

### Therapeutic Applications

[0631] Genetically-edited immune cells of the disclosure can be used in methods of therapy, for example, therapies for a cancer, inflammatory disorder, autoimmune disorder, or infectious disease. Modifications that can be introduced into the immune cell genome include, for example, insertions, deletions, sequence replacement, (e.g., substitutions), and combinations thereof. One or more sequences can be inserted into the genome, for example, to allow expression of an exogenous gene product (e.g., a T cell receptor or chimeric antigen receptor of known antigen-specificity, an immunoglobulin of known specificity, a cytokine or cytokine receptor, a chemokine or chemokine receptor, or a protein comprising a drug-responsive domain). A promoter sequence can be inserted into the genome, for example, to allow for regulated or constitutive expression of and endogenous gene product or an exogenous (inserted) gene product. One or more genes can be disrupted, for example, to disrupt expression of a product that contributes to the pathogenesis of a disease (e.g., an immune checkpoint gene that decreases an anti-cancer or anti-pathogen immune response, or a pro-inflammatory gene that contributes to an inflammatory disorder or autoimmune disorder). A defined sequence can be deleted from the genome, for example, to alter the function of a gene product (e.g., deletion of an exon or deletion of one or more domains of a protein). A sequence in the genome can be replaced by another sequence, for example, to replace a disease-associated sequence (e.g., SNP or mutation) with a normal sequence, or to alter the function of a gene product (e.g., binding affinity for an antigen, ligand, agonist, antagonist etc.).

[0632] Exemplary cancers include, but are not limited to, acute lymphocytic cancer, acute myeloid leukemia, alveolar rhabdomyosarcoma, bladder cancer, bone cancer, brain cancer, breast cancer, anal cancer, anal canal cancer, rectum cancer, eye cancer, intrahepatic bile duct cancer, joint cancer, neck cancer, gallbladder cancer, pleura cancer, nose cancer, nasal cavity cancer, middle ear cancer, oral cavity cancer, vulva cancer, chronic lymphocytic leukemia, chronic myeloid cancer, colon cancer, esophageal cancer, cervical cancer, fibrosarcoma, gastrointestinal cancer, Hodgkin lymphoma, hypopharynx cancer, kidney cancer, larynx cancer, leukemia, liquid tumors, liver cancer, lung cancer, lymphoma, malignant mesothelioma, mastocytoma, melanoma, multiple myeloma, nasopharynx cancer, non-Hodgkin lymphoma, ovarian cancer, pancreatic cancer, peritoneum cancer, omentum cancer, mesentery cancer, pharynx cancer, prostate cancer, rectal cancer, renal cancer, skin cancer, small intestine cancer, soft tissue cancer, solid tumors, stomach cancer, testicular cancer, thyroid cancer, ureter cancer, and urinary bladder cancer.

[0633] In some embodiments, the cancer is bladder cancer, epithelial cancer, bone cancer, brain cancer, breast cancer, esophageal cancer, gastrointestinal cancer, leukemia, liver cancer, lung cancer, lymphoma, myeloma, ovarian cancer, prostate cancer, sarcoma, stomach cancer, thyroid cancer, acute lymphocytic cancer, acute myeloid leukemia, alveolar rhabdomyosarcoma, anal canal, rectal cancer, ocular cancer, cancer of the neck, gallbladder cancer, pleural cancer, oral cancer, cancer of the vulva, colon cancer, cervical cancer, fibrosarcoma, gastrointestinal carcinoid tumor, Hodgkin lymphoma, kidney cancer, mesothelioma, mastocytoma, melanoma, multiple myeloma, nasopharynx cancer, non-Hodgkin lymphoma, pancreatic cancer, peritoneal cancer, renal cancer, skin cancer, small intestine cancer, soft tissue cancer, solid tumors, stomach cancer, testicular cancer, or thyroid cancer. In some embodiments, the cancer is gastrointestinal cancer, breast cancer, lymphoma, or prostate cancer.

[0634] Exemplary autoimmune diseases include, but are not limited to, achalasia, Addison's disease, adult still's disease, agammaglobulinemia, alopecia areata, amyloidosis, ankylosing spondylitis, anti-GBM/Anti-TBM nephritis, antiphospholipid syndrome, autoimmune angioedema, autoimmune dysautonomia, autoimmune encephalomyelitis, autoimmune hepatitis, autoimmune inner ear disease (AIED), autoimmune myocarditis, autoimmune oophoritis, autoimmune orchitis, autoimmune pancreatitis, autoimmune retinopathy, autoimmune urticaria, axonal & neuronal neuropathy, baló disease, behcet's disease, benign mucosal pemphigoid, bullous pemphigoid, castleman disease, celiac disease, chagas disease, chronic inflammatory demyelinating polyneuropathy, chronic recurrent multifocal osteomyelitis, churg-strauss syndrome, eosinophilic granulomatosis, cicatricial pemphigoid, cogan's syndrome, cold agglutinin disease, congenital heart block, coxsackie myocarditis, CREST syndrome, crohn's disease, dermatitis herpetiformis, dermatomyositis, devic's disease (neuromyelitis optica), discoid lupus, dressler's syndrome, endometriosis, eosinophilic esophagitis, eosinophilic fasciitis, erythema nodosum, essential mixed cryoglobulinemia, evans syndrome, fibromyalgia fibrosing alveolitis, giant cell arteritis (temporal arteritis), giant cell myocarditis, glomerulonephritis, goodpasture's syndrome, granulomatosis with polyangiitis graves' disease, guillain-barre syndrome, hashimoto's thyroiditis, hemolytic anemia, henoch-schonlein purpura, herpes gestationis or pemphigoid gestationis, hidradenitis suppurativa, hypogammaglobulinemia, IgA nephropathy, IgG4-related sclerosing disease, immune thrombocytopenic purpura, inclusion body myositis, interstitial cystitis, juvenile arthritis, juvenile diabetes, juvenile myositis, kawasaki disease, lambert-eaton syndrome, leukocytoclastic vasculitis, lichen planus lichen sclerosis, ligneous conjunctivitis, linear IgA disease, lupus, lyme disease chronic, Meniere's disease, microscopic polyangiitis, mixed connective tissue disease, mooren's ulcer, mucha-habermann disease, multifocal motor neuropathy, multiple sclerosis, myasthenia gravis, myositis, narcolepsy, neonatal lupus, neuromyelitis optica, neutropenia, ocular cicatricial pemphigoid, optic neuritis, palindromic rheumatism, PANDAS, paraneoplastic cerebellar degeneration, paroxysmal nocturnal hemoglobinuria, parry romberg syndrome, pars planitis, parsonage-turner syndrome, pemphigus, peripheral neuropathy, perivenous encephalomyelitis, pernicious anemia, POEMS syndrome, polyarteritis nodosa, polyglandular syndromes type I, II, III, polymyalgia rheumatica, polymyositis, postmyocardial infarction syndrome, postpericardiotomy syndrome, primary biliary cirrhosis, primary sclerosing cholangitis, progesterone dermatitis, psoriasis, psoriatic arthritis, pure red cell aplasia, pyoderma gangrenosum, raynaud's phenomenon, reactive arthritis, reflex sympathetic dystrophy, relapsing polychondritis, restless legs syndrome, retroperitoneal fibrosis, rheumatic fever, rheumatoid arthritis, sarcoidosis, Schmidt syndrome, scleritis, scleroderma, Sjögren's syndrome, sperm & testicular autoimmunity, stiff person syndrome, subacute bacterial endocarditis, Susac's syndrome, sympathetic ophthalmia, Takayasu's arteritis, temporal arteritis/giant cell arteritis, thrombocytopenic purpura, Tolosa-Hunt syndrome, transverse myelitis, type 1 diabetes, ulcerative colitis, undifferentiated connective tissue disease, uveitis, vasculitis, vitiligo, and Vogt-Koyanagi-Harada disease.

[0635] The cells described herein can be administered to a subject in need thereof. In some embodiments, the cells are allogenic or autologous to the subject they are administered to. In some embodiments, the cells are administered as a single dose. In some embodiments, the cells are administered in multiple doses. In some embodiments, the cells are administered via intravenous infusion.

[0636] In some embodiments, target cells such as cancer cells can form a tumor. A tumor treated with the compositions and methods provided herein can result in stabilized tumor growth (e.g., one or more tumors do not increase more than 1%, 5%, 10%, 15%, or 20% in size, and/or do not metastasize). In some embodiments, a tumor is stabilized for at least about 1, 2, 3, 4, 5, 6, 7, 8, 9, 10, 11, 12, or more weeks. In some embodiments, a tumor is stabilized for at least about 1, 2, 3, 4, 5, 6, 7, 8, 9, 10, 11, 12, or more months. In some embodiments, a tumor is stabilized for at least about 1, 2, 3, 4, 5, 6, 7, 8, 9, 10, or more years. In some embodiments, the size of a tumor or the number of tumor cells is reduced by at least about 5%, 10%, 15%, 20%, 25, 30%, 35%, 40%, 45%, 50%, 55%, 60%, 65%, 70%, 75%, 80%, 85%, 90%, 95% or more. In some embodiments, the tumor is completely eliminated, or reduced below a level of detection. In some embodiments, a subject remains tumor free (e.g. in remission) for at least about 1, 2, 3, 4, 5, 6, 7, 8, 9, 10, 11, 12, or more weeks following treatment. In some embodiments, a subject remains tumor free for at least about 1, 2, 3, 4, 5, 6, 7, 8, 9, 10, 11, 12, or more months following treatment. In some embodiments, a subject remains tumor free for at least about 1, 2, 3, 4, 5, 6, 7, 8, 9, 10, or more years after treatment.

[0637] Death of target cells such as cancer cells can be determined by any suitable method, including, but not limited to, counting cells before and after treatment, or measuring the level of a marker associated with live or dead cells (e.g. live or dead target cells). Degree of cell death can be determined by any suitable method. In some embodiments, degree of cell death is determined with respect to a starting condition. For example, an individual can have a known starting amount of target cells, such as a starting cell mass of known size or circulating target cells at a known concentration. In such cases, degree of cell death can be expressed as a ratio of surviving cells after treatment to the starting cell population. In some embodiments, degree of cell death can be determined by a suitable cell death assay. A variety of cell death assays are available, and can utilize a variety of detection methodologies. Examples of detection methodologies include, without limitation, the use of cell staining, microscopy, flow cytometry, cell sorting, and combinations of these. When a tumor is subject to surgical resection following completion of a therapeutic period, the efficacy of treatment in reducing tumor size can be determined by measuring the percentage of resected tissue that is necrotic (i.e., dead). In some embodiments, a treatment is therapeutically effective if the necrosis percentage of the resected tissue is greater than about 20% (e.g., at least about 30%, 40%, 50%, 60%, 70%, 80%, 90%, or 100%). In some embodiments, the necrosis percentage of the resected tissue is 100%, that is, no living tumor tissue is present or detectable.

[0638] Exposing a cancer cell to an immune cell or population of immune cells disclosed herein can be conducted either in vitro or in vivo. Exposing a target cell to an immune cell or population of immune cells generally refers to bringing the target cell in contact with the immune cell and/or in sufficient proximity such that an antigen of a target cell (e.g., membrane bound or non-membrane bound) can bind to the antigen interacting domain of the chimeric transmembrane receptor polypeptide expressed in the immune cell. Exposing a target cell to an immune cell or population of immune cells in vitro can be accomplished by co-culturing the target cells and the immune cells. Target cells and immune cells can be co-cultured, for example, as adherent cells or alternatively in suspension. Target cells and immune cells can be co-cultured in various suitable types of cell culture media, for example with supplements, growth factors, ions, etc. Exposing a target cell to an immune cell or population of immune cells in vivo can be accomplished, in some cases, by administering the immune cells to a subject, for example a human subject, and allowing the immune cells to localize to the target cell via the circulatory system. In some cases, an immune cell can be delivered to the immediate area where a target cell is localized, for example, by direct injection. Exposing can be performed for any suitable length of time, for example at least 1 minute, at least 5 minutes, at least 10 minutes, at least 30 minutes, at least 1 hour, at least 2 hours, at least 3 hours, at least 4 hours, at least 5 hours, at least 6 hours, at least 7 hours, at least 8 hours, at least 12 hours, at least 16 hours, at least 20 hours, at least 24 hours, at least 2 days, at least 3 days, at least 4 days, at least 5 days, at least 6 days, at least 1 week, at least 2 weeks, at least 3 weeks, at least 1 month or longer.

### Kits

[0639] Any of the compositions described herein may be comprised in a kit. In a non-limiting example, a transgene, a vector, a polynucleotide, a peptide, reagents to generate compositions provided herein, and any combination thereof may be comprised in a kit. In some cases, kit components are provided in suitable container means.

[0640] Kits may comprise a suitably aliquoted composition. The components of the kits may be packaged either in aqueous media or in lyophilized form. The container means of the kits will generally include at least one vial, test tube, flask, bottle, syringe or other container means, into which a component may be placed, and preferably, suitably aliquoted. Where there is more than one component in the kit, the kit also will generally contain a second, third or other additional container into which the additional components may be separately placed. However, various combinations of components may be comprised in a vial. The kits also will typically include a means for containing the components in close confinement for commercial sale. Such containers may include injection or blow-molded plastic containers into which the desired vials are retained.

[0641] However, the components of the kit may be provided as dried powder(s). When reagents and/or components are provided as a dry powder, the powder can be reconstituted by the addition of a suitable solvent. It is envisioned that the solvent may also be provided in another container means.

[0642] In some embodiments, a kit can comprise an engineered guide RNA, a precursor engineered guide RNA, a vector comprising the engineered guide RNA or the precursor engineered guide RNA, or a nucleic acid of the engineered guide RNA or the precursor engineered guide RNA, an engineered cellular receptor, a polynucleotide encoding the engineered cellular receptor, or a pharmaceutical composition that comprises any of the above and a container. In some instances, a container can be plastic, glass, metal, or any combination thereof.

[0643] In some instances, a packaged product comprising a composition described herein can be properly labeled. In some instances, the pharmaceutical composition described herein can be manufactured according to good manufacturing practice (cGMP) and labeling regulations. In some cases, a pharmaceutical composition disclosed herein can be aseptic.

[0644] While preferred embodiments have been shown and described herein, it will be obvious to those skilled in the art that such embodiments are provided by way of example only. Numerous variations, changes, and substitutions will now occur to those skilled in the art. It should be understood that various alternatives to the embodiments described herein may be employed. It is intended that the following claims define the scope and that methods and structures within the scope of these claims and their equivalents be covered herein.

### EXAMPLES

### Example 1: Isolation of T Cells

[0645] Peripheral blood mononuclear cells (PBMCs) are isolated from whole blood or an apheresis unit using ammonium chloride-based RBC lysis and/or density gradient centrifugation (e.g., Ficoll-Paque). PBMCs are enumerated, cell density is adjusted to 5×10\hat{ }7 cells/mL in EasySep buffer or PBS with 2% FBS and 1 mM EDTA (Calcium and Magnesium-free), and up to 8 mL is transferred to a round bottom tube. An isolation cocktail from an EasySep Human T-cell Isolation kit (Cat #19051) is added to the cells at 50 uL/mL. The cells are mixed by pipetting and incubated for 5 minutes at room temperature. RapidSpheres are mixed by vortexing for 30 seconds, and added to the sample at 40 uL/mL. Samples are topped up to 5 mL or 10 mL and mixed gently by pipetting. The tube is placed into an EasySep magnet and incubated at room temperature for 3 minutes. Non-T cells are captured on the magnet, while T cells remain unbound. Isolated T cells are transferred to a new conical tube by carefully pipetting or pouring the supernatant in one continuous motion. T cells are counted, and purity validated by flow cytometry (e.g., validated for >90% CD3+ cells). Cells can be cultured, stimulated, or aliquoted and frozen for future use (e.g., with Cryostor CS10).

### Example 2: Expansion of T Cells

[0646] Isolated T cells are plated at a density of 1×10\hat{ }6 cells/mL in a 24 well plate in OpTmizer™ T-Cell Expansion Basal Medium with 2.6% OpTmizer™ T-Cell Expansion Supplement, 2.5% CTS™ Immune Cell Serum Replacement, 1% L-Glutamine, 1% Penicillin/Streptomycin, 10 mM N-Acetyl-L-cysteine, 300 IU/mL recombinant human IL-2, 5 ng/mL recombinant human IL-7, and 5 ng/mL recombinant human IL-15. If frozen cells frozen isolated T cells are used, the cells are rested for at least 4-5 h after thawing prior to stimulation.

[0647] Human T-Activator CD3/CD28 Dynabeads are washed with culturing media, collected using a magnet, and added to the isolated T cells at a ratio of 2 beads per cell or 1 bead for every 2.5 cells. The cells are incubated at 37° C., 5% CO2. After 12-24 hours, the sample is gently pipetted to redistribute the beads. After a total of 36 hours of incubation the beads are removed using a magnet.

### Example 3: Nucleofection of T Cells

[0648] Isolated T cells are stimulated as outlined in Example 2 and are electroporated using the Lonza 4D Nucleofector™ X Unit & Amaxa 4D-Nucleofector X Kits. Cells are pelleted, washed once with kit-provided buffer, resuspended in kit-provided buffer, and transferred to a cuvette according to kit instructions.

[0649] For 100 uL cuvettes, 5-15 ug Cas9 mRNA, and 5-25 ug gRNA-RNA is added per cuvette. If plasmid DNA is added to the 100 uL cuvette, 5-10 ug of plasmid DNA is added.

[0650] For 20 uL cuvettes, 1-3 ug Cas9 mRNA, and 1-5 ug gRNA-RNA is added per cuvette. If plasmid DNA is added to the 20 uL cuvette, 1-2 ug of plasmid DNA is added.

[0651] Nucleofection is performed according to kit instructions. The cells are rested for 15 minutes in the cuvette, then transferred to a recovery plate containing antibiotic-free culture media. Cells are handled gently with minimal pipetting. For 100 uL cuvettes, contents are transferred to 1 mL per well of a 6 well plate. For 20 uL cuvettes, contents are transferred to 300 uL per well of a 24 well plate. If plasmid DNA was added, 1 ug DNase is included in recovery wells. Cells are incubated for 30 minutes at 37° C., 5% CO2, then additional culture media is added to bring the cell concentration to 1×10\hat{ }6 cells/mL, and cultures are maintained at 37° C., 5% CO2. Growth and viability are monitored periodically, e.g., via trypan blue exclusion with an automated cell counter.

### Example 4: Genomic Editing of T Cells Comprising Single Strand Annealing

[0652] A DNA minicircle construct is designed and synthesized comprising the elements represented in FIG. 1A. The “Insert” box represents a DNA sequence comprising a promoter (MND promoter), and an open reading frame encoding a T Cell Receptor (an exogenous G12D KRAS-specific TCR comprising a mouse TCRb sequence recognizable by specific monoclonal antibodies), including a poly-A tail. T1 represents a sequence targeted for cleavage by a guide RNA (for example, a guide RNA that does not target the genome (e.g., zebrafish guide RNA or algorithmically-designed guide RNA), or a guide RNA that targets a disruption target site in the genome). H1 and H2 represent short homology arms with sequences homologous to chosen sites in the genome (48 base pair sequences within TRAC exon 1). As a control, a DNA minicircle construct is designed comprising the insert with 1000 base pair homology arms instead of 48 base pair homology arms.

[0653] The construct is designed for insertion at a TRAC target site in the genome represented in FIG. 1B. H1 and H2 represent sequences in the genome homologous to H1 and H2 in the DNA minicircle construct. C2 represents a sequence targeted for cleavage by a guide RNA (e.g., the same guide RNA that targets C1 or a different guide RNA).

[0654] Human T cells are isolated as in Example 1, and expanded as in Example 2, and electroporated using a Lonza 4D Nucleofector™ X Unit and Amaxa 4D-Nucleofector X Kit. Cells are pelleted, washed once with kit-provided buffer, resuspended in kit-provided buffer, and transferred to 20 uL cuvettes according to kit instructions.

[0655] DNA and/or RNA are added to the cuvettes in the amounts shown in Table 2.

TABLE 2

| | | DNA | | | |
|---|---|---|---|---|---|
| | DNA | minicircle | | | DNA |
| | minicircle | with 1000 | | TRAC | minicircle |
| | with 48 bp | bp | | (C2)- | (C1)- |
| | homology | homology | Cas9 | targeting | targeting |
| Condition # | arms | arms | mRNA | gRNA | gRNA |
| 1 | — | — | — | — | — |
| 2 | — | 1 ug | — | — | — |
| 3 | 1 ug | — | — | — | — |
| 4 | — | 1 ug | 1.5 ug | 1 ug | — |
| 5 | — | 1 ug | 3 ug | 1 ug | — |
| 6 | 1 ug | — | 1.5 ug | 1 ug | 1 ug |
| 7 | 1 ug | — | 3 ug | 1 ug | 1 ug |

[0656] Nucleofection is performed according to kit instructions. The cells are rested for 15 minutes in the cuvette, then transferred to a 24-well plate containing 300 uL of antibiotic-free culture medium per well, with 1 ug DNase. Cells are handled gently with minimal pipetting. Cells are incubated for 30 minutes at 37° C., 5% CO2, then additional culture media is added to bring the cell concentration to 1×10\hat{ }6 cells/mL. Cultures are maintained at 37° C., 5% CO2 for 7 days, with media changed and cultures split as needed.

[0657] On day 7 post-nucleofection, cells are analyzed by flow cytometry to determine the frequency and number of cells expressing the TCR encoded by the DNA minicircle constructs. 5×10≡cells per experimental condition are taken, pelleted, and stained with fluorescently-conjugated monoclonal antibodies specific for CD3 and the insert TCR. The cells are also stained with a viability dye. After staining, cells are subjected to flow cytometry, and live cells are analyzed for expression of CD3 and the insert TCR.

[0658] FIG. 2 presents the results for experimental conditions 1-3 and illustrates that in conditions without nuclease or guide RNA, the insert TCR is not expressed. Each column represents a condition. Each row represents a sample derived from a different donor. The y-axes represent fluorescence from CD3 staining, and the X-axes represent fluorescence from staining for the insert TCR. The numbers represent the percentage of live cells that fall within the quadrant.

[0659] FIG. 3 presents the results from experimental conditions 4-7 and illustrates that higher proportions and numbers of cells express the insert TCR in the experimental conditions with 48 base pair homology arms and minicircle-targeting guide RNAs (conditions 6 & 7) compared to the experimental conditions with the 1000 base pair homology arms (conditions 4 & 5). Each column represents a condition. Each row represents a sample derived from a different donor. The y-axes represent fluorescence from CD3 staining, and the X-axes represent fluorescence from staining for the insert TCR. The numbers represent the percentage of live cells that fall within the quadrant. These results demonstrate improved efficiency of immune cell genome editing using methods that comprise single strand annealing compared to homologous recombination.

[0660] FIG. 4 provides the percentage of live cells that express the insert TCR from experimental conditions 1-7. Data are presented for samples processed from two donors, with two technical replicates per donor. The results illustrate that higher proportions and numbers of cells express the insert TCR in the experimental conditions with 48 base pair homology arms and minicircle-targeting guide RNAs (conditions 6 & 7) compared to the experimental conditions with the 1000 base pair homology arms (conditions 4 & 5). These results demonstrate improved efficiency of immune cell genome editing using methods that comprise single strand annealing compared to homologous recombination.

TABLE 3
Exemplary polynucleic acid constructs

| SEQ | | |
|---|---|---|
| ID | | |
| NO | Identity | Sequence |
| 78 | Anti-TRAC gRNA | mU*mC*mU* rCrUrC rArGrC |
| | (exemplary | rUrGrG rUrArC rArCrG |
| | modifications | rGrCrG rUrUrU rUrArG |
| | denoted) | rArGrC rUrArG rArArA |
| | | rUrArG rCrArA rGrUrU |
| | | rArArA rArUrA rArGrG |
| | | rCrUrA rGrUrC rCrGrU |
| | | rUrArU rCrArA rCrUrU |
| | | rGrArA rArArA rGrUrG |
| | | rGrCrA rCrCrG rArGrU |
| | | rCrGrG rUrGrC mU*mU*mU* |
| | | rU |
| 79 | Anti-TRAC gRNA | UCUCUCAGCUGGUACACGGCGU |
| | | UUUAGAGCUAGAAAUAGCAAGU |
| | | UAAAAUAAGGCUAGUCCGUUAU |
| | | CAACUUGAAAAAGUGGCACCGA |
| | | GUCGGUGCUUUU |
| 80 | Genomic target | GCCGTGTACCAGCTGAGAGA |
| | sequence of anti- | |
| | TRAC gRNA (sense | |
| | strand) | |
| 81 | Anti-TRAC gRNA | UCUCUCAGCUGGUACACGGC |
| | spacer sequence | |

### Example 5: Genomic Editing of T Cells Comprising Single Strand Annealing

[0661] A DNA minicircle construct is designed and synthesized comprising the elements represented in FIG. 1A. The “Insert” box represents a DNA sequence comprising a promoter and an open reading frame encoding green fluorescent protein (GFP). T1 represents a sequence targeted for cleavage by a guide RNA (for example, a guide RNA that does not target the genome (e.g., zebrafish guide RNA or algorithmically-designed guide RNA), or a guide RNA that targets a disruption target site in the genome). H1 and H2 represent short homology arms with sequences homologous to chosen sites in the genome (48 base pair sequences within the AAVS1 safe harbor locus). As a control, a DNA minicircle construct is designed comprising the insert with 1000 base pair homology arms instead of 48 base pair homology arms.

An exemplary gRNA that targets a xenogeneic sequence, such as a universal sequence, can comprise from about 50%, 60%, 70%, 80%, 85%, 90%, 95%, 97%, 98%, 99%, or 100% identity to: GGGAGGCGUUCGGGCCACAGGUUUUAGAGCUAGAAAUAGCAAGUUAAAAUAA GGCUAGUCCGUUAUCAACUUGAAAAAGUGGCACCGAGUCGGUGCUUUU (SEQ ID NO: 82). The exemplary aforementioned gRNA can also comprise modifications, such as those described in: mG*mG*mG*rArGrG rCrGrU rUrCrG rGrGrC rCrArC rArGrG rUrUrU rUrArG rArGrC rUrArG rArArA rUrArG rCrArA rGrUrU rArArA rArUrA rArGrG rCrUrA rGrUrC rCrGrU rUrArU rCrArA rCrUrU rGrArA rArArA rGrUrG rGrCrA rCrCrG rArGrU rCrGrG rUrGrC mU*mU*mU*rU (SEQ ID NO: 83). The spacer sequence of an exemplary universal guide (zebrafish) gRNA can comprise from about 50%, 60%, 70%, 80%, 85%, 90%, 95%, 97%, 98%, 99%, or 100% identity to: gggaggcguucgggccacag (SEQ ID NO: 84). A target sequence that can be bound by the aforementioned universal gRNA (exemplary universal sequence), T1, comprises: CTGTGGCCCGAACGCCTCCC (SEQ ID NO: 85).

[0662] The genomic target sequence that is bound by the AAVS1 gRNA comprises: CTAGGGACAGGATTGGTGAC (SEQ ID NO: 86). The AAVS1 gRNA can share the backbone, or region lacking the spacer sequence, of any one of SEQ ID NO: 79 or 82. For example, the AAVS1 gRNA can comprise the backbone of SEQ ID NO: 79, which correspond to residues 21-100.

[0663] The construct is designed for insertion at an AAVS1 target site in the genome represented in FIG. 1B. H1 and H2 represent sequences in the genome homologous to H1 and H2 in the DNA minicircle construct. T2 represents a sequence targeted for cleavage by a guide RNA (e.g., the same guide RNA that targets C1 or a different guide RNA).

[0664] Human T cells are isolated as in Example 1, and expanded as in Example 2, and electroporated using a Lonza 4D Nucleofector™ X Unit & Amaxa 4D-Nucleofector X Kit. Cells are pelleted, washed once with kit-provided buffer, resuspended in kit-provided buffer, and transferred to 20 uL cuvettes according to kit instructions.

[0665] DNA and/or RNA are added to the cuvettes in the amounts shown in Table 4.

TABLE 4

| | | DNA | | | |
|---|---|---|---|---|---|
| | DNA | minicircle | | | DNA |
| | minicircle | with 1000 | | AAVS1 | minicircle |
| | with 48 bp | bp | | (C2)- | (C1)- |
| | homology | homology | Cas9 | targeting | targeting |
| Condition # | arms | arms | mRNA | gRNA | gRNA |
| 1 | — | — | — | — | — |
| 2 | — | 1 ug | — | — | — |
| 3 | 1 ug | — | — | — | — |
| 4 | — | 1 ug | 1.5 ug | 1 ug | — |
| 5 | — | 1 ug | 3 ug | 1 ug | — |
| 6 | 1 ug | — | 1.5 ug | 1 ug | 1 ug |
| 7 | 1 ug | — | 3 ug | 1 ug | 1 ug |

[0666] Nucleofection is performed according to kit instructions. The cells are rested for 15 minutes in the cuvette, then transferred to a 24-well plate containing 300 uL of antibiotic-free culture medium per well, with 1 ug DNase. Cells are handled gently with minimal pipetting. Cells are incubated for 30 minutes at 37° C., 5% CO2, then additional culture media is added to bring the cell concentration to 1×10\hat{ }6 cells/mL. Cultures are maintained at 37° C., 5% CO2 for 7 days, with media changed and cultures split as needed.

[0667] On day 7 post-nucleofection, cells are analyzed by flow cytometry to determine the frequency of cells expressing the GFP reporter from the DNA minicircle constructs. 5×10≡cells per experimental condition are taken, pelleted, and stained with a viability dye. After staining, cells are subjected to flow cytometry, and live cells are analyzed for expression of GFP.

[0668] FIG. 5 provides the percentage of live cells that express the GFP reporter from experimental conditions 1-7. Data are presented for samples processed from two donors, with three technical replicates per donor. The results illustrate efficient immune cell genome editing using methods that comprise single strand annealing.

### Example 6: Materials and Methods for T Cell Modification

[0669] This Example provides materials and methods used in the examples 7-11 involving certain steps of primary T cell isolation, culture, transfection, and post-electroporation culture.

### Exemplary Protocol 1

[0670] Materials

[0671] Culturing Media:
[0672] X-VIVO 15 w/gentamicin, w/L-glutamine, w/transferrin, w/phenol red
[0673] X-VIVO 15 w/out gentamicin w/out phenol red, w/L-glutamine, w/transferrin
[0674] (*recovery media)
[0675] 10% AB Human Serum
[0676] DNase I Solution (1 mg/ml)
[0677] 3001 U/ml IL-2
[0678] 5 ng/ml IL-7
[0679] 5 ng/ml IL-15

[0680] Freezing Media:
[0681] Cryostor CS10

[0682] Cell Separation Reagents:
[0683] Human T-cell Isolation Kit
[0684] Ammonium chloride RBC lysis solution

[0685] Other Reagents:
[0686] Dynamag-2
[0687] Neon Kits

[0688] Antibody List:
[0689] Anti-Human CTLA4
[0690] Anti-human PD-1
[0691] Anti-human CD3

[0692] Methods

Isolation of Peripheral Blood Mononuclear Cells (PBMCs) from an Apheresis Unit (Leukopak) Using Ammonium Chloride Based RBC Lysis
[0693] (a) Measure volume of blood in leukopak
[0694] (b) Dispense leukopac into sterile 500 ml bottle and add equal volume of Ammonium chloride solution
[0695] (c) Mix by inverting several times
[0696] (d) Incubate on ice for 15 min
[0697] (e) Distribute sample evenly into 50 ml conicals and centrifuge at 500×g for 10 minutes.
[0698] (f) Carefully remove and discard supernatant.
[0699] (g) Top up the tube with 1×PBS+2% human AB serum and centrifuge at 150×g for 10 minutes with brake off.
[0700] (h) Repeat this wash step at least 1 time to remove platelets.
[0701] (i) Resuspend in appropriate media for T-cell purification using the EasySep Human T-cell Isolation kit.
   Isolation of Peripheral Blood Mononuclear Cells (PBMCs) from a Trima Cone Using Ammonium Chloride Based RBC Lysis
[0702] (a) Measure volume of blood in cone (usually −10 ml)
[0703] (b) Split volume into two 50 ml conicals
[0704] (c) Add 15 ml of 1×ACK lysis solution
[0705] (d) Incubate on ice for 20 min and quench with 20 ml 1×PBS+2% human AB Serum
[0706] (e) Centrifuge at 500×g for 10 minutes.
[0707] (f) Carefully remove and discard supernatant.
[0708] (g) Top up the tube with 1×PBS+2% human AB serum and centrifuge at 150×g for 10 minutes with brake off.
[0709] (h) Repeat this wash step at least 1 time to remove platelets.
[0710] (i) Resuspend in appropriate media for T-cell purification using the EasySep Human T-cell Isolation kit.

### Isolation of CD3+ T Cells Using EasySep Human T-Cell Isolation Kit (Cat #19051)

[0711] (a) Count Ficoll Separated PBMCs (*or washed apheresis unit/Leukopac) and adjust cell density to 1×10\hat{ }7 cells/mL.
[0712] (b) Transfer up to 45 mL to 50 ml conical tube (For use with Easy “50” magnet).
[0713] (c) Add 50 uL/mL of the Isolation Cocktail to the cells.
[0714] (d) Mix by pipetting and incubate for 10 minutes at room temperature.
[0715] (e) Vortex RapidSpheres for 30 seconds and add 50 uL/mL to the sample. Mix by pipetting up and down and incubate at RT for 10 minutes.
[0716] (f) Top up to 50 mL for samples >10 mLs.
[0717] (g) Place conical tube into Easy “50” magnet and incubate at room temperature for 10 minutes.
[0718] (h) Carefully pipette suspension out of conical in magnet and dispense in new 50 mL conical.
[0719] (i) Place conical back into magnet for second isolation and incubate for 5 minutes.
[0720] (j) Remove unbound T-cells by carefully removing supernatant in one round of pipetting using 50 ml pipette and transfer to new 50 ml conical.
[0721] (k) Count T-cells and validate purity by flow cytometry for % CD3+(>90%)
[0722] (l) Aliquot and freeze unused cells for future use (Crystor or 90% FBS:10% DMSO)

### Thawing Samples Originally Frozen in CryoStor CS10

[0723] (a) Thaw the cells in pre-warmed culture media (37° C.). Use the same type of media they will be cultured in.
[0724] (b) Add 1 mL of culture media to a sterile 15 mL conical tube.
[0725] (c) Thaw frozen vials in a 37° C. water bath until a single ice crystal remains. Immediately take the vials to a biosafety cabinet, spray with 70% ethanol and wipe.
[0726] (d) Open vials carefully. Gently pipet cell suspension dropwise from one vial into the 15 ml conical tube.
[0727] (e) Add an additional 1 ml of culture media dropwise and gently swirl.
[0728] (f) Add another 1 ml of culture media dropwise and gently swirl.
[0729] (g) Add additional 4 ml of culture media and gently mix.
[0730] (h) Centrifuge at 175 g for 10 min. Higher centrifugal forces will lead to cell death.
[0731] (i) Aspirate supernatant and suspend the cell pellet in culture medium.
[0732] (j) Cells are ready to be counted and tested or placed in culture. Do not delay getting the cells into culture medium and into the incubator.
   Stimulation of CD3+ T Cells with Dynabeads
[0733] (a) Plate isolated T-cells at a density of 1×10\hat{ }6 cells/mL in a 24 well plate in X-vivo media+10% human AB serum+300 IU/ml IL, 5 ng/ml IL-7, and 5 ng/ml of IL-15.
[0734] (b) Calculate the number of Dynabeads Human T-Activator CD3/CD28 beads (Gibco, Life Technologies) required to obtain 2:1 ratio (beads:cells) and wash with 1×PBS with 0.2% BSA, collecting beads using dynamagnet-2.
[0735] (c) Add washed beads at a 2:1 ratio or 1:2.5 (beads:cells) to the cells.
[0736] (d) Incubate cells for between 24-36 hours at 37° C. and 5% CO2.
[0737] (e) Remove beads using a dynamagnet-2.
[0738] (f) Culture cells without beads for at least 30 minutes before electroporation.

### Neon Transfection of CD3+ T Cells

[0739] (a) Stimulated T cells are electroporated using the Neon Transfection System (100 uL or 10 ul Kit, Invitrogen, Life Technologies).
[0740] (b) Pellet cells and wash once with PBS or T buffer.
[0741] (c) Resuspend cells at a density of 3×10≡cells in 10 uL of T buffer for 10 ul tip, and 1×10\hat{ }6 cells in 100 ul T buffer for 100 ul tips.
[0742] (d) Add specified mass of mRNA/DNA and electroporated at 1400 V, 10 ms, 3 pulses.
   [0743] a. For knockout using all mRNA:
      [0744] i. 100 ul tip: 15 ug Cas9 mRNA, 10 ug gRNA-RNA
      [0745] ii. 10 ul tip: 1.5 ug Cas9 mRNA, 1 ug gRNA-RNA
   [0746] b. When including plasmid donor for knock-in:
      [0747] i. 100 ul tip: 5-20 ug plasmid
      [0748] ii. 10 ul tip: 0.5-2 ug plasmid
   [0749] c. For sequential electroporations:
      [0750] On 0 hr timepoint deliver the amount of Cas9 specified in “a”
      [0751] ii. At time point 0 hr and 6-24 hr, deliver gRNA and plasmid together in amounts specified in “a” and “b”.
[0752] (e) After transfection, plate cells at 3000 cells/ul in antibiotic free culture media containing 10 ug/ml DNase I and incubate at 37° C. in 5% CO2 for ˜20 minutes.
[0753] (f) After recovery period, add 2 times volume of antibiotic containing media to well and culture at 37° C. in 5% CO2.
   rAAV Transduction of CD3+ T Cells
[0754] (a) Thaw rAAV on ice and mix well prior to addition to cells.
[0755] (b) Add specified MOI at the following timepoints post-electroporation
   [0756] a. For Cas9 mRNA edited cells:
      [0757] i. Add virus 4-6 hours post
   [0758] b. For Cas9 protein (RNP):
      [0759] i. Add virus 15 minutes post

### Post-Electroporation Culture of Primary T Cells

[0760] 1. Observe media color post-electroporation as indicator for media addition. The timing will vary depending on the health of the cells for particular experiments/donors. When media begins to turn orange in color (as early as 48 hrs in some cases), double the volume of the culture media with culture media containing 2× concentration of cytokines (2× media). Continue this process as needed over the course of culture period.
[0761] 2. In some cases, if cells are growing very rapidly (particularly around day 7-9) and media is become spent quickly the cells can be spun down and reconstituted in 2-3 times volume of 1× media.
[0762] 3. In cases where cells are growing poorly and 3-4 days have passed without a need for media doubling, carefully remove ˜50% of the media by pipetting from the top being cautious to not disturb cells settled on the bottom of the flask and replace with equal volume 2× media.

### Exemplary Protocol 2 (Additional Stimulation): Modifications Over Exemplary Protocol 1

[0763] Reagents and Materials

(A) Culturing Media: 1 L OpTmizer™ T-Cell Expansion Basal Medium (Gibco Cat #A10221-01) with 2.6% OpTmizer™ T-Cell Expansion Supplement (Gibco Cat #A10484-02), 2.5% CTS™ Immune Cell Serum Replacement (Gibco Cat #A25961-01), 1% L-Glutamine (Gibco Cat #25030-081), 1% Penicillin/Streptomycin (Millipore Cat #TMS-AB2-C), 10 mM N-Acetyl-L-cysteine (Sigma Cat #A9165-256), 3001 U/ml Recombinant Human IL-2 (Peprotech Cat #200-02), 5 ng/ml Recombinant Human IL-7 (Peprotech Cat #200-07), 5 ng/ml Recombinant Human IL-15 (Peprotech Cat #200-15).
(B) Recovery Media: Culturing Media without Penicillin/Streptomycin.

### (C) Freezing Media: Cryostor CS10 (Stemcell Cat #07930).

[0764] (D) Separation Buffer: 1 L Phosphate Buffered Saline 1× (Hyclone Cat #SH302-56-01) with 0.2% Human AB Serum Heat Inactivated (Valley Biomedical Cat #HP1022HI), 1% Penicillin/Streptomycin (Millipore Cat #TMS-AB2-C) and 0.1 M EDTA pH 8.0 (Invitrogen Cat #AM9261)
(E) FACS Buffer: 500 mls Phosphate Buffered Saline 1× (Hyclone Cat #SH302-56-01) with 0.5% Penicillin/Streptomycin (Millipore Cat #TMS-AB2-C), 0.1% Human AB Serum Heat Inactivated (Valley Biomedical Cat #HP1022HI) and 0.1 M EDTA pH 8.0 (Invitrogen Cat #AM9261)

### (F) Cell Separation Reagents: Human T-cell Isolation Kit (Stem Cell Technologies Cat #17951) and ACK Lysing Buffer (Quality Biological Cat #118-156-101).

### (G) Additional Reagents: Dynabeads Human T-Activator CD3/CD28 (Gibco Cat #11132D), Amaxa 4D-Nucleofector X Kits (Lonza Cat #V4XP-3032, V4XP-3024), Stemcell EasySep Human T-cell Isolation kit (Cat #19051).

[0765] (H) Antibodies: APC Mouse Anti Human CD3 (BD Pharmingen Cat #555335), Anti Mouse TCRb PE CY 7 Clone H57-597 (eBioscience Cat #25-5961-80), Anti Mouse TCRb PE CY 7 Clone SK7 (BD Biosciences Cat #340440), and Fixable Viability Dye eFluor 780 (eBioscience Cat #65-0865-14).
(I) Materials: DynaMag™-2 magnet (ThermoFisher Scientific Cat #12321D), The Big Easy EasySep™ Magnet (Stemcell Cat #18001), and The Invitrogen™ Countess™ II FL Automated Cell Counter (ThermoFisher Scientific Cat #AMQAF1000).

[0766] Isolation of peripheral blood mononuclear cells (PBMCs) from a Trima cone using Ammonium Chloride based RBC lysis is performed as previously described.

[0767] Isolation of CD3+ T Cells Using EasySep Human T-Cell Isolation Kit (Cat #19051)

(A) Count Ficoll Separated PBMCs (*or washed apheresis unit/Leukopac) and adjust cell density to 1×10\hat{ }7 cells/ml.
(B) Transfer up to 8 mL to 14 ml round bottom tube (For use with “The Big Easy” EasySep magnet).
(C) Add 50 uL/mL of the Isolation Cocktail to the cells.
(D) Mix by pipetting and incubate for 5 minutes at room temperature.
(E) Vortex RapidSpheres for 30 seconds and add 40 uL/mL to the sample. Mix by pipetting up and down and incubate at RT for 3 minutes.
(F) Top up to 5 mL for samples <4 mLs, Top up to 10 ml for samples >4 mls.
(G) Remove unbound T-cells by carefully removing supernatant in one round of pipetting using sterile pipette to transfer to new conical tube.
(H) Count T-cells and validate purity by flow cytometry for % CD3+(>90%).
(I) Aliquot and freeze unused cells for future use with Cryostor CS10 (Stemcell Cat #07930).

[0768] Amaxa Nucleofection of CD3+ T Cells

Stimulated T cells are electroporated using the Lonza 4D Nucleofector™ X Unit & Amaxa 4D-Nucleofector X Kits using P3 buffer (V4XP-3032, V4XP-3024).
[0769] 1) For the P3 kit the buffer solution Master Mix must be prepared beforehand and allowed to come to RT. Once mixed it will be good for 90 days stored at 4° C. so only make slightly more than is required for a given experiment.
   [0770] 18 uL Supplement 1+82 uL P3 Primary Cell Nucleofector Solution
      [0771] 100 ul cuvette: 90 uL P3 buffer mix/reaction
      [0772] 20 ul cuvette: 18 uL P3 buffer mix/reaction
[0773] 2) Mix and agitate cells well using a pipette to disrupt binding to the Dynabeads.
[0774] 3) Remove beads using a dynamagnet-2.
[0775] 4) Wash cells once with PBS at 400×g for 5 min.
[0776] 5) Resuspend cells and count.
   [0777] For 100 ul cuvette you can use 2-20×10\hat{ }6 cells/condition.
   [0778] For 20 ul cuvette you can use 0.5-1×10\hat{ }6 cells/condition.
[0779] 6) Move appropriate number of cells +1 extra reaction's worth to a new 50 mL conical (i.e. for 10 reactions, start with 11×10\hat{ }6 cells).
[0780] 7) Fill conical to 50 mL with PBS and spin at 200×g for 10 min.
[0781] 8) Aspirate the PBS as carefully as possible by slowly decanting the conical while the aspirator collects liquid. Do not move aspirator lower than the angled lip at the bottom of the tube as the pellet will be loose. We have found it best to simply hold it in this manner for 15-20 s.
[0782] 9) Resuspend cells in the P3 Master Mix you have prepared.
   [0783] 100 ul cuvette: 90 uL P3 buffer mix/reaction
   [0784] 20 ul cuvette: 18 uL P3 buffer mix/reaction
[0785] 10) Add desired volume of mRNA/DNA to 100 uL PCR tubes on ice in a sterile environment
   [0786] For knockout using all mRNA:
      [0787] 100 ul cuvette: 5-15 ug Cas9 mRNA, 5-25 ug gRNA
      [0788] 20 ul cuvette: 1-3 ug Cas9 mRNA, 1-5 ug gRNA
   [0789] When including plasmid donor/DNA:
      [0790] 100 ul cuvette: 5-10 ug plasmid
      [0791] 20 ul cuvette: 1-2 ug plasmid
   [0792] Nucleic acid amounts scale based on reaction volume not cell number in this system so large cuvettes should contain 5× optimized amounts of mRNA/gRNA/DNA from the small cuvettes whether using 2 or 20 million cells.
   [0793] Be sure to use concentrated nucleic acids for this protocol (1 ug/uL or greater) to ensure you are not diluting out the buffer reagents.
[0794] 11) Add Master Mix containing cells to each tube prepared in step 10.
   [0795] 100 ul cuvette: 90 uL P3 buffer mix with cells/reaction
   [0796] 20 ul cuvette: 18 uL P3 buffer mix with cells/reaction
[0797] 12) Mix each tube once with a pipette to incorporate all reagents and move total reaction mixture into the appropriate cuvette.
   [0798] Maximum loading volume of cuvettes—leave any extra in PCR tube
      [0799] 100 ul cuvette: 120 uL
      [0800] 20 ul cuvette: 24 uL
[0801] 13) CAP IT, TAP IT, ZAP it
   [0802] Place cap on cuvette/s
   [0803] Tap lightly on a flat surface several times to ensure that any bubbles are removed
   [0804] Take to the Amaxa X module and electroporate the sample
      [0805] For all mRNA/gRNA zaps use program EO-115
      [0806] For all zaps containing DNA use program FI-115
[0807] 14) After nucleofection allow cells to rest for 10-15 minutes in cuvette in hood.
[0808] 15) During this incubation prepare a recovery plate containing 300 ul per well of 24 well plate if using 20 ul cuvette & 1 ml per well of 6 well plate if using 100 ul cuvette. Be sure to use recovery media for this (Culture Media with no antibiotics) *Include 1 ug DNASE in recovery wells if plasmid DNA is used*
[0809] 16) After 15 minutes transfer to recovery plate by taking 80 uL of recovery media from the plate that you have set up and adding it to the cuvette.
[0810] 17) Incubate at 37° C. and 5% CO2 for 30-60 minutes.
[0811] 18) After 30 min incubation add additional regular media with antibiotics to bring cells up to 1×10\hat{ }6 cell/ml and culture at 37° C. in 5% CO2.
   [0812] 700 uL for 1×10\hat{ }6 cells in a 24 well plate
   [0813] 3 mL for 2-20×10\hat{ }6 cells in a 6 well plate
[0814] 19) Culture cells, feed by carefully pulling old medium off top of wells and adding back in new or moving cells up to larger wells/plates as needed to culture.

[0815] Additional “Continuous” Stimulation of T Cells

(A) Calculate the # of Dynabeads Human T-Activator CD3/CD28 beads required to obtain 1:2 ratio (beads:cells) and wash with Culturing Media, collecting beads using dynamagnet-2. Utilize ¼ the amount used in the initial T cell activation.
(B) During the addition of media at step 18 in the Amaxa nucleofection protocol, add beads to the regular culture media before adding to cells.
(C) Add bead/media mixture to the cells and gently mix once.
(D) Culture cells normally, do not pipette wells to break up clumps of beads/cells.

[0816] Flow Cytometry

(A) Using cell counts, pull 0.5-1×10\hat{ }6 cells per sample to perform FACS.
(B) Prepare cells by adding 1×PBS to wash, spin at 1000×g for 3 minutes, decant supernatant off then add stain according to manufacturer recommendations for each antibody.
(C) Mix and let incubate 20-30 minutes in the dark.
(D) Following 30 minute incubation add 1 mL FACS Buffer to quench, spin again, and decant supernatant off.
(E) Repeat wash 1 more time with FACS Buffer.
(F) Resuspend pellet in 300 ul FACS Buffer to run FACS.

### Example 7: Examination of Transfection Efficiency by Flow Cytometry

[0817] Electroporated T cells are analyzed by flow cytometry ˜24-48 hours after transfection to test for expression of GFP or other fluorochrome (marker for transgene expression). For knockout experiments, analysis for loss of target protein is conducted between 7-9 days post transfection. For knock-in experiments, measure marker expression on day 7 and day 14. Cells are prepared by washing with chilled 1×PBS with 0.5% FBS and stain according to manufacturer recommendations for each antibody.

### Example 8: DNase Treatment Increased T Cell Survival after Electroporation

[0818] This example examined the effect of DNase on post-electroporation T cell survival. As shown in the representative photo in FIG. 14, 24 hours following electroporation with plasmid donor vector, activated T cell culture that was not treated with DNase showed cell clumping and dead cells floating on the medium, while T cell culture treated with DNase did not show cell clumping or floating cell corpses.

### Example 9: DNase Treatment Increased Viability and Transfection Efficiency of T Cells

[0819] This example examined the effect of DNase on post-electroporation T cell survival as well as transfection efficiency. Primary human T cells were cultured and stimulated with IL-2, IL-7, and IL-15. Later the T cells were either pulsed (control) or transfected with 1.5 μg of pMND-GFP plasmid (about 7.5 kb) at 36 hr or 48 hr post-stimulation. For comparison, DNase was added to recovery media of one group of transfected cells at 10 μg/ml. Cells were incubated in this recovery media following electroporation for 30 min. And after recovery, 2 times volume of complete media was added without any wash step (therefore diluted DNase remained in the media).

[0820] Cells were analyzed 24 hr post electroporation by flow cytometry to determine the percentage of recovered viable cells, as shown in FIG. 15A. FIG. 15B is a graph showing the percent recovery of the transfected cells in each group. DNase increased percent recovery in both “36 hr pMND-GFP” group, where cells were transfected with pMND-GFP plasmid at 36 hr post-stimulation, and “48 hr pMND-GFP” group, where cells were transfected with pMND-GFP at 48 hr post-stimulation.

[0821] Transfection efficiency was also assessed by examining the stable expression of the transgenes introduced by the plasmids. FIG. 15C is a graph showing percentage of GFP-expressing cells in each group of cells, and FIG. 15D is a graph showing percentage of mTCR-expressing cells in each group of cells. In these experiments, the primary T cells were transfected through electroporation with plasmid donor expressing GFP or mTCR on day 0 or 1, FACs was performed to examine the transgene expression on day 14 post electroporation. As shown in FIGS. 15C and 15D, DNase treatment increased integration efficiency for both GFP and mTCR under all tested conditions.

### Example 10. DNase and RS-1 Treatment Increased Transfection Efficiency of T Cells

[0822] This example examined the effects of treatment of electroporated T cells with DNase, RS-1, or both DNase and RS-1, on transfection efficiency. Primary T cells were transfected through electroporation with plasmid donor expressing GFP or mTCR on day 0 or 1, FACs was performed to examine the transgene expression on day 14 post electroporation.

[0823] FIGS. 16A and 16B show percentage of GFP+ and mTCR+ cells, respectively. As shown in the figures, when T cells were transfected on day 1, treatment of DNase and RS-1 combined with DNase both promoted GFP expression and mTCR expression.

[0824] FIGS. 17A-17D are FACs density plots of T cells on day 7 post electroporation. FIG. 17A shows day 7 percent GFP expression of T cells that were electroporated on day 0 post stimulation with pulse (control), Cas9 and gRNA, donor (GFP), donor and DNase, or donor, DNase, and RS-1. FIG. 17B shows day 7 percent mTCR expression of T cells that were electroporated on day 0 post stimulation with pulse (control), Cas9 and gRNA, donor (GFP), donor and DNase, or donor, DNase, and RS-1. FIG. 17C shows day 7 percent GFP expression of T cells that were electroporated on day 1 post stimulation with pulse (control), Cas9 and gRNA, donor (GFP), donor and DNase, or donor, DNase, and RS-1. FIG. 17D shows day 7 percent mTCR expression of T cells that were electroporated on day 1 post stimulation with pulse (control), Cas9 and gRNA, donor (GFP), donor and DNase, or donor, DNase, and RS-1. Number in each plot shows the percentage of cells with positive GFP or mTCR signal.

[0825] FIGS. 18A-18B are FACs density plots of T cells on day 14 post electroporation. FIG. 18A shows day 14 percent GFP and mTCR expression of T cells electroporated on day 0 post stimulation with pulse (control), Cas9 and gRNA, donor (GFP or mTCR), donor and DNase, or donor, DNase, and RS-1. FIG. 5B shows day 14 percent GFP and mTCR expression of T cells electroporated on day 1 post stimulation with pulse (control), Cas9 and gRNA, donor (GFP or mTCR), donor and DNase, or donor, DNase, and RS-1.

[0826] FIG. 19 shows FACs analysis of electroporation efficiency for T cells from donor 055330 electroporated with or without RS-1, or DNase and a mTCR at 36 hours post stimulation or 36 hours post stimulation and 6 hours post initial electroporation.

[0827] FIG. 20 shows FACs analysis of electroporation efficiency for T cells from donor 119866 electroporated with or without RS-1, or DNase and a mTCR at 36 hours post stimulation or 36 hours post stimulation and 6 hours post initial electroporation.

[0828] FIG. 21 shows FACs analysis of electroporation efficiency for T cells from donor 120534 electroporated with or without RS-1, or DNase and a mTCR at 36 hours post stimulation or 36 hours post stimulation and 6 hours post initial electroporation.

[0829] FIG. 22A shows FACs analysis of electroporation efficiency for T cells from donors 055330 and 119866 electroporated with or without RS-1, or DNase and a mTCR at 36 hours post stimulation and 24 hours post initial electroporation. FIG. 22B shows FACs analysis of electroporation efficiency for donor 120534 electroporated with or without RS-1, or DNase and a mTCR at 36 hours post stimulation and 24 hours post initial electroporation.

### Example 11. Effects of NAC, Akt Inhibitor, and Anti-IFNAR2 on Viability and Transfection Efficiency of T Cells

[0830] This example examined the effects of treatment with NAC, Akt VIII inhibitor, or anti-IFNAR2, on post-electroporation T cell survival as well as transfection efficiency. In these experiments, 2×10⁶ cells in 100 μl were electroporated non-sequentially at 36 hr post-stimulation. After electroporation, the cells were recovered for 15 min, and then split equally among 5 different supplement conditions, as listed in Table 5. NAC was added to the medium at 10 mM for duration, Akt VIII inhibitor at 8 μM for duration, and anti-IFNAR2 antibody was added to the media once at 10 μg/ml. “Nuc” in Table 2 and FIGS. 22A-22D denotes the condition where exogenous DNA was added to be inserted into cell genome at 20 μg (“+20 μg), 35 μg (“+35 μg), or 50 μg (“+50 μg”).

TABLE 5
Supplemental Conditions

| | | Akt VIII | NAC + Akt | IFNAR2 |
|---|---|---|---|---|
| Control | NAC | inhibitor | VIII | Antibody |
| Pulse | Pulse | Pulse | Pulse | Pulse |
| Cas9, gRNA | Cas9, gRNA | Cas9, gRNA | Cas9, gRNA | Cas9, gRNA |
| Nuc + 20 μg | Nuc + 20 μg | Nuc + 20 μg | Nuc + 20 μg | Nuc + 20 μg |
| Nuc + 30 μg | Nuc + 30 μg | Nuc + 30 μg | Nuc + 30 μg | Nuc + 30 μg |
| Nuc + 50 μg | Nuc + 50 μg | Nuc + 50 μg | Nuc + 50 μg | Nuc + 50 μg |

[0831] FIG. 23A-FIG. 23C show graphs of viable cell count in each condition on day 2, 5, and 7 post-electroporation, respectively. FIG. 23D-FIG. 23F show graphs of percentage of viable cells in each condition on day 2, 5, and 7 post-electroporation, respectively. As shown in FIG. 23B and FIG. 23C, under the experimental conditions, NAC treatment as well as IFNAR2 antibody treatment increased cell viability on day 7 post-electroporation. FIG. 24 shows a graph of percentage of mTCR positive cells on day 7 post-electroporation, it was found that when exogenous DNA was added at 30 μg and 50 μg, treatment with IFNAR2 antibody increased the percentage of mTCR expressing cells, suggesting an increase in integration efficiency.

### Example 12. Evaluation of DNA Repair Proteins in Donor Transgene Expression

[0832] Exemplary DNA repair proteins, for example those implicated in repair mechanisms such as SSA or HR, were knocked out in the HCT116 cell line. Modified cells were utilized in an in vitro assay to determine if any repair protein has an effect on the expression of a donor, such as a cellular receptor, in a cell that has undergone transfection. Cells having knock outs in RAD52, Exo1, PolQ, BRD3, Lig3, RAD54B, or none (WT) were electroporated with an AAVS1 splice acceptor (SA)-GFP donor. Flow cytometry results measured on day 10 post electroporation are shown in FIG. 26A and charted in FIG. 26B and FIG. 26C.

### Example 13. Timing of Delivery of Transgene Donor and Knock-In Efficiency Electroporation Timing

[0833] To determine if delivery timing of a transgene donor to cells plays any role in transgene expression, cells were transfected with 1 ug of an exemplary splice acceptor GFP donor (HR or SSA donor) with homology arms specific to AAVS1 (left homology arm from the adeno-associated virus integration site (AAVS1) within intron 1 of the human PPP1R12C gene) or 1 ug of an exemplary chimeric antigen receptor delivered via minicircle vector (anti-mesothelin CAR SSA donor) transgene at 24 hrs., 36 hr., 48 hrs., and 72 hrs. points post stimulation. Cells were evaluated for expression of GFP or CAR 7 days post electroporation. FIG. 28A shows the perfect T cells in S phase of control cells vs cells delivered an HR donor. FIG. 28B shows percent GFP on day 7 post electroporation and FIG. 28C shows percent CD34 (CAR) on day 7 post electroporation.

[0834] For reporting purposes enhanced GFP was utilized. The mammalian codon-optimized sequence comprises:

(SEQ ID NO: 87)
MVSKGEELFTGVVPILVELDGDVNGHKFSVSGEGEG
DATYGKLTLKFICTTGKLPVPWPTLVTTLTYGVQCF
SRYPDHMKQHDFFKSAMPEGYVQERTIFFKDDGNYK
TRAEVKFEGDTLVNRIELKGIDFKEDGNILGHKLEY
NYNSHNVYIMADKQKNGIKVNFKIRHNIEDGSVQLA
DHYQQNTPIGDGPVLLPDNHYLSTQSALSKDPNEKR
DHMVLLEFVTAAGITLGMDELYK.

TABLE 6
Exemplary polynucleic acid constructs

| SEQ | | |
|---|---|---|
| ID | | |
| NO | Identity | Sequence |
| 88 | pMC-HR- | acattaccctgttatccctagatgacattaccctg |
| | AAVS1- | ttatcccagatgacattaccctgttatccctagat |
| | SA-GFP | gacattaccctgttatccctagatgacatttaccc |
| | (HR). | tgttatccctagatgacattaccctgttatcccag |
| | Forward | atgacattaccctgttatccctagatacattaccc |
| | homology | tgttatcccagatgacataccctgttatccctaga |
| | arm | tgacattaccctgttatcccagatgacattaccct |
| | (735- | gttatccctagatacattaccctgttatcccagat |
| | 779; 45 | gacataccctgttatccctagatgacattaccctg |
| | bp in | ttatcccagatgacattaccctgttatccctagat |
| | size); | acattaccctgttatcccagatgacataccctgtt |
| | Reverse | atccctagatgacattaccctgttatcccagatga |
| | homology | cattaccctgttatccctagatacattaccctgtt |
| | arm | atcccagatgacataccctgttatccctagatgac |
| | (3612- | attaccctgttatcccagatgacattaccctgtta |
| | 3651; 40 | tccctagatacattaccctgttatcccagatgaca |
| | bp in | taccctgttatccctagatgacattaccctgttat |
| | size) | cccagatgacattaccctgttatccctagatacat |
| | | taccctgttatcccagatgacataccctgttatcc |
| | | ctagatgacattaccctgttatcccagataaactc |
| | | aatgatgatgatgatgatggtcgagactcagcggc |
| | | cgcggtgccagggcgtgcccttgggctccccgggc |
| | | gcgactagtgaattctgctttctctgacctgcatt |
| | | ctctcccctgggcctgtgccgctttctgtctgcag |
| | | cttgtggcctgggtcacctctacggctggcccaga |
| | | tccttccctgccgcctccttcaggttccgtcttcc |
| | | tccactccctcttccccttgctctctgctgtgttg |
| | | ctgcccaaggatgctctttccggagcacttccttc |
| | | tcggcgctgcaccacgtgatgtcctctgagcggat |
| | | cctccccgtgtctgggtcctctccgggcatctctc |
| | | ctccctcacccaaccccatgccgtcttcactcgct |
| | | gggttcccttttccttctccttctggggcctgtgc |
| | | catctctcgtttcttaggatggccttctccgacgg |
| | | atgtctcccttgcgtcccgcctccccttcttgtag |
| | | gcctgcatcatcaccgtttttctggacaaccccaa |
| | | agtaccccgtctccctggctttagccacctctcca |
| | | tcctcttgctttctttgcctggacaccccgttctc |
| | | ctgtggattcgggtcacctctcactcctttcattt |
| | | gggcagctcccctaccccccttacctctctagtct |
| | | gtgctagctcttccagccccctgtcatggcatctt |
| | | ccaggggtccgagagctcagctagtcttcttcctc |
| | | caacccgggcccctatgtccacttcaggacagcat |
| | | gtttgctgcctccagggatcctgtgtccccgagct |
| | | gggaccaccttatattcccagggccggttaatgtg |
| | | gctctggttctgggtacttttatctgtcccctcca |
| | | ccccacagtggggccactagggacagcgatcgggt |
| | | acatcgatcgcaggcgcaatcttcgcatttctttt |
| | | ttccagatggtgagcaagggcgaggagctgttcac |
| | | cggggtggtgcccatcctggtcgagctggacggcg |
| | | acgtaaacggccacaagttcagcgtgtccggcgag |
| | | ggcgagggcgatgccacctacggcaagctgaccct |
| | | gaagttcatctgcaccaccggcaagctgcccgtgc |
| | | cctggcccaccctcgtgaccaccctgacctacggc |
| | | gtgcagtgcttcagccgctaccccgaccacatgaa |
| | | gcagcacgacttcttcaagtccgccatgcccgaag |
| | | gctacgtccaggagcgcaccatcttcttcaaggac |
| | | gacggcaactacaagacccgcgccgaggtgaagtt |
| | | cgagggcgacaccctggtgaaccgcatcgagctga |
| | | agggcatcgacttcaaggaggacggcaacatcctg |
| | | gggcacaagctggagtacaactacaacagccacaa |
| | | cgtctatatcatggccgacaagcagaagaacggca |
| | | tcaaggtgaacttcaagatccgccacaacatcgag |
| | | gacggcagcgtgcagctcgccgaccactaccagca |
| | | gaacacccccatcggcgacggccccgtgctgctgc |
| | | ccgacaaccactacctgagcacccagtccgccctg |
| | | agcaaagaccccaacgagaagcgcgatcacatggt |
| | | cctgctggagttcgtgaccgccgccgggatcactc |
| | | tcggcatggacgagctgtacaagtaacgcggccgc |
| | | ctgtgccttctagttgccagccatctgttgtttgc |
| | | ccctcccccgtgccttccttgaccctggaaggtgc |
| | | cactcccactgtcctttcctaataaaatgaggaaa |
| | | ttgcatcgcattgtctgagtaggtgtcattctatt |
| | | ctggggggtggggtggggcaggacagcaaggggga |
| | | ggattgggaagacaatagcaggcatgctggggatg |
| | | cggtgggctctatgggattggtgacagaaaagccc |
| | | catccttaggcctcctccttcctagtctcctgata |
| | | ttgggtctaacccccacctcctgttaggcagattc |
| | | cttatctggtgacacacccccatttcctggagcca |
| | | tctctctccttgccagaacctctaaggtttgctta |
| | | cgatggagccagagaggatcctgggagggagagct |
| | | tggcagggggtgggagggaagggggggatgcgtga |
| | | cctgcccggttctcagtggccaccctgcgctaccc |
| | | tctcccagaacctgagctgctctgacgcggctgtc |
| | | tggtgcgtttcactgatcctggtgctgcagcttcc |
| | | ttacacttcccaagaggagaagcagtttggaaaaa |
| | | caaaatcagaataagttggtcctgagttctaactt |
| | | tggctcttcacctttctagtccccaatttatattg |
| | | ttcctccgtgcgtcagttttacctgtgagataagg |
| | | ccagtagccagccccgtcctggcagggctgtggtg |
| | | aggaggggggtgtccgtgtggaaaactccctttgt |
| | | gagaatggtgcgtcctaggtgttcaccaggtcgtg |
| | | gccgcctctactccctttctctttctccatccttc |
| | | tttccttaaagagtccccagtgctatctgggacat |
| | | attcctccgcccagagcagggtcccgcttccctaa |
| | | ggccctgctctgggcttctgggtttgagtccttgg |
| | | caagcccaggagaggcgctcaggcttccctgtccc |
| | | ccttcctcgtccaccatctcatgcccctggctctc |
| | | ctgccccttcxctacaggggttcctggctctgctc |
| | | ttcagactgagccccgttcccctgcatccccgttc |
| | | ccctgcatcccccttcccctgcatcccccagaggc |
| | | cccaggccacctacttggcctggaccccacgagag |
| | | gccaccccagccctgtctaccaggctgccttttgg |
| | | gtggattctcctccaactgtggggtgactgcttgg |
| | | gatatctctagagtcgacccatgggggcccgcccc |
| | | aactggggtaacctttgagttctctcagttggggg |
| | | taatcagcatcatgatgtggtaccacatcatgatg |
| | | ctgattataagaatgcggccgccacactctagtgg |
| | | atctcgagttaataat |
| | | tcagaagaactcgtcaagaaggcgatagaaggcga |
| | | tgcgctgcgaatcgggagcggcgataccgtaaagc |
| | | acgaggaagcggtcagcccattcgccgccaagctc |
| | | ttcagcaatatcacgggtagccaacgctatgtcct |
| | | gatagcggtccgccacacccagccggccacagtcg |
| | | atgaatccagaaaagcggccattttccaccatgat |
| | | attcggcaagcaggcatcgccatgggtcacgacga |
| | | gatcctcgccgtcgggcatgctcgccttgagcctg |
| | | gcgaacagttcggctggcgcgagcccctgatgctc |
| | | ttcgtccagatcatcctgatcgacaagaccggctt |
| | | ccatccgagtacgtgctcgctcgatgcgatgtttc |
| | | gcttggtggtcgaatgggcaggtagccggatcaag |
| | | cgtatgcagccgccgcattgcatcagccatgatgg |
| | | atactttctcggcaggagcaaggtgtagatgacat |
| | | ggagatcctgccccggcacttcgcccaatagcagc |
| | | cagtcccttcccgcttcagtgacaacgtcgagcac |
| | | agctgcgcaaggaacgcccgtcgtggccagccacg |
| | | atagccgcgctgcctcgtcttgcagttcattcagg |
| | | gcaccggacaggtcggtcttgacaaaaagaaccgg |
| | | gcgcccctgcgctgacagccggaacacggcggcat |
| | | cagagcagccgattgtctgttgtgcccagtcatag |
| | | ccgaatagcctctccacccaagcggccggagaacc |
| | | tgcgtgcaatccatcttgttcaatcatgcgaaacg |
| | | atcctcatcctgtctcttgatcagagcttgatccc |
| | | ctgcgccatcagatccttggcggcgagaaagccat |
| | | ccagtttactttgcagggcttcccaaccttaccag |
| | | agggcgccccagctggcaattccggttcgcttgct |
| | | gtccataaaaccgcccagtctagctatcgccatgt |
| | | aagcccactgcaagctacctgctttctctttgcgc |
| | | ttgcgttttcccttgtccagatagcccagtagctg |
| | | acattcatccggggtcagcaccgtttctgcggact |
| | | ggctttctacgtgctcgaggggggccaaacggtct |
| | | ccagcttggctgttttggcggatgagagaagattt |
| | | tcagcctgatacagattaaatcagaacgcagaagc |
| | | ggtctgataaaacagaatttgcctggcggcagtag |
| | | cgcggtggtcccacctgaccccatgccgaactcag |
| | | aagtgaaacgccgtagcgccgatggtagtgtgggg |
| | | tctccccatgcgagagtagggaactgccaggcatc |
| | | aaataaaacgaaaggctcagtcgaaagactgggcc |
| | | tttcgttttatctgttgtttgtcggtgaacgctct |
| | | cctgagtaggacaaatccgccgggagcggatttga |
| | | acgttgcgaagcaacggcccggagggtggcgggca |
| | | ggacgcccgccataaactgccaggcatcaaattaa |
| | | gcagaaggccatcctgacggatggcctttttgcgt |
| | | ttctacaaactcttttgtttatttttctaaataca |
| | | ttcaaatatgtatccgctcatgaccaaaatccctt |
| | | aacgtgagttttcgttccactgagcgtcagacccc |
| | | gtagaaaagatcaaaggatcttcttgagatccttt |
| | | ttttctgcgcgtaatctgctgcttgcaaacaaaaa |
| | | aaccaccgctaccagcggtggtttgtttgccggat |
| | | caagagctaccaactctttttccgaaggtaactgg |
| | | cttcagcagagcgcagataccaaatactgtccttc |
| | | tagtgtagccgtagttaggccaccacttcaagaac |
| | | tctgtagcaccgcctacatacctcgctctgctaat |
| | | cctgttaccagtggctgctgccagtggcgataagt |
| | | cgtgtcttaccgggttggactcaagacgatagtta |
| | | ccggataaggcgcagcggtcgggctgaacgggggg |
| | | ttcgtgcacacagcccagcttggagcgaacgacct |
| | | acaccgaactgagatacctacagcgtgagctatga |
| | | gaaagcgccacgcttcccgaagggagaaaggcgga |
| | | caggtatccggtaagcggcagggtcggaacaggag |
| | | agcgcacgagggagcttccagggggaaacgcctgg |
| | | tatctttatagtcctgtcgggtttcgccacctctg |
| | | acttgagcgtcgatttttgtgatgctcgtcagggg |
| | | ggcggagcctatggaaaaacgccagcaacgcggcc |
| | | tttttacggttcctggccttttgctggccttttgc |
| | | tcacatgttctttcctgcgttatcccctgattctg |
| | | tggataaccgtattaccgcctttgagtgagctgat |
| | | accgctcgccgcagccgaacgaccgagcgcagcga |
| | | gtcagtgagcgaggaagcggaagagcgcctgatgc |
| | | ggtattttctccttacgcatctgtgcggtatttca |
| | | caccgcatatggtgcactctcagtacaatctgctc |
| | | tgatgccgcatagttaagccagtatacactccgct |
| | | atcgctacgtgactgggtcatggctgcgccccgac |
| | | acccgccaacacccgctgacgcgccctgacgggct |
| | | tgtctgctcccggcatccgcttacagacaagctgt |
| | | gaccgtctccgggagctgcatgtgtcagaggtttt |
| | | caccgtcatcaccgaaacgcgcgaggcagcagatc |
| | | aattcgcgcgcgaaggcgaagcggcatgcataatg |
| | | tgcctgtcaaatggacgaagcagggattctgcaaa |
| | | ccctatgctactccgtcaagccgtcaattgtctga |
| | | ttcgttaccaattatgacaacttgacggctacatc |
| | | attcactttttcttcacaaccggcacggaactcgc |
| | | tcgggctggccccggtgcattttttaaatacccgc |
| | | gagaaatagagttgatcgtcaaaaccaacattgcg |
| | | accgacggtggcgataggcatccgggtggtgctca |
| | | aaagcagcttcgcctggctgatacgttggtcctcg |
| | | cgccagcttaagacgctaatccctaactgctggcg |
| | | gaaaagatgtgacagacgcgacggcgacaagcaaa |
| | | catgctgtgcgacgctggcgat |
| 89 | pMC- | acattaccctgttatccctagatgacattaccctg |
| | AAVS1- | ttatcccagatgacattaccctgttatccctagat |
| | SSA48v | gacattaccctgttatccctagatgacatttaccc |
| | 3-SA- | tgttatccctagatgacattaccctgttatcccag |
| | GFP- | atgacattaccctgttatccctagatacattaccc |
| | 2cut_ | tgttatcccagatgacataccctgttatccctaga |
| | universal | tgacattaccctgttatcccagatgacattaccct |
| | gRNA | gttatccctagatacattaccctgttatcccagat |
| | (SSA/H | gacataccctgttatccctagatgacattaccctg |
| | MEJ) | ttatcccagatgacattaccctgttatccctagat |
| | Forward | acattaccctgttatcccagatgacat |
| | homology | accctgttatccctagatgacattaccctgttatc |
| | arm | ccagatgacattaccctgttatccctagatacatt |
| | (735- | accctgttatcccagatgacataccctgttatccc |
| | 779; 45 | tagatgacattaccctgttatcccagatgacatta |
| | bp in | ccctgttatccctagatacattaccctgttatccc |
| | length) | agatgacataccctgttatccctagatgacattac |
| | 5′ | cctgttatcccagatgacattaccctgttatccct |
| | universal | agatacattaccctgttatcccagatgacataccc |
| | guide | tgttatccctagatgacattaccctgttatcccag |
| | (780- | ataaactcaatgatgatgatgatgatggtcgagac |
| | 802; 23 | tcagcggccgcggtgccagggcgtgcccttgggct |
| | bp in | ccccgggcgcgactagtgggaggcgttcgggccac |
| | length) | agcggcccgttctgggtacttttatctgtcccctc |
| | Universal | caccccacagtggggccactacgatcgatcgatcg |
| | guide | caggcgcaatcttcgcatttcttttttccagatgg |
| | 3′ | tgagcaagggcgaggagctgttcaccggggtggtg |
| | (1891- | cccatcctggtcgagctggacggcgacgtaaacgg |
| | 1913; 23 | ccacaagttcagcgtgtccggcgagggcgagggcg |
| | bp in | atgccacctacggcaagctgaccctgaagttcatc |
| | length) | tgcaccaccggcaagctgcccgtgccctggcccac |
| | Reverse | cctcgtgaccaccctgacctacggcgtgcagtgct |
| | homology | tcagccgctaccccgaccacatgaagcagcacgac |
| | arm | ttcttcaagtccgccatgcccgaaggctacgtcca |
| | (1914- | ggagcgcaccatcttcttcaaggacgacggcaact |
| | 1947; | acaagacccgcgccgaggtgaagttcgagggcgac |
| | 34 | accctggtgaaccgcatcgagctgaagggcatcga |
| | bp in | cttcaaggaggacggcaacatcctggggcacaagc |
| | length) | tggagtacaactacaacagccacaacgtctatatc |
| | | atggccgacaagcagaagaacggcatcaaggtgaa |
| | | cttcaagatccgccacaacatcgaggacggcagcg |
| | | tgcagctcgccgaccactaccagcagaacaccccc |
| | | atcggcgacggccccgtgctgctgcccgacaacca |
| | | ctacctgagcacccagtccgccctgagcaaagacc |
| | | ccaacgagaagcgcgatcacatggtcctgctggag |
| | | ttcgtgaccgccgccgggatcactctcggcatgga |
| | | cgagctgtacaagtaattaattaatgagcggccgc |
| | | gtttcagacatgataagatacattgatgagtttgg |
| | | acaaaccacaactagaatgcagtgaaaaaaatgct |
| | | ttatttgtgaaatttgtgatgctattgctttattt |
| | | gtaaccattataagctgcaataaacaagttaacaa |
| | | caacaattgcattcattttatgtttcaggttcagg |
| | | gggaggtgtgggaggttttttgacgtcgggacagg |
| | | attggtgacagaaaagccccatccttaggcctcct |
| | | ccttcaaaccgctgtggcccgaacgcctcccgtcg |
| | | acccatgggggcccgccccaactggggtaaccttt |
| | | gagttctctcagttgggggtaatcagcatcatgat |
| | | gtggtaccacatcatgatgctgattataagaatgc |
| | | ggccgccacactctagtggatctcgagttaataat |
| | | tcagaagaactcgtcaagaaggcgatagaaggcga |
| | | tgcgctgcgaatcgggagcggcgataccgtaaagc |
| | | acgaggaagcggtcagcccattcgccgccaagctc |
| | | ttcagcaatatcacgggtagccaacgctatgtcct |
| | | gatagcggtccgccacacccagccggccacagtcg |
| | | atgaatccagaaaagcggccattttccaccatgat |
| | | attcggcaagcaggcatcgccatgggtcacgacga |
| | | gatcctcgccgtcgggcatgctcgccttgagcctg |
| | | gcgaacagttcggctggcgcgagcccctgatgctc |
| | | ttcgtccagatcatcctgatcgacaagaccggctt |
| | | ccatccgagtacgtgctcgctcgatgcgatgtttc |
| | | gcttggtggtcgaatgggcaggtagccggatcaag |
| | | cgtatgcagccgccgcattgcatcagccatgatgg |
| | | atactttctcggcaggagcaaggtgtagatgacat |
| | | ggagatcctgccccggcacttcgcccaatagcagc |
| | | cagtcccttcccgcttcagtgacaacgtcgagcac |
| | | agctgcgcaaggaacgcccgtcgtggccagccacg |
| | | atagccgcgctgcctcgtcttgcagttcattcagg |
| | | gcaccggacaggtcggtcttgacaaaaagaaccgg |
| | | gcgcccctgcgctgacagccggaacacggcggcat |
| | | cagagcagccgattgtctgttgtgcccagtcatag |
| | | ccgaatagcctctccacccaagcggccggagaacc |
| | | tgcgtgcaatccatcttgttcaatcatgcgaaacg |
| | | atcctcatcctgtctcttgatcagagcttgatccc |
| | | ctgcgccatcagatccttggcggcgagaaagccat |
| | | ccagtttactttgcagggcttcccaaccttaccag |
| | | agggcgccccagctggcaattccggttcgcttgct |
| | | gtccataaaaccgcccagtctagctatcgccatgt |
| | | aagcccactgcaagctacctgctttctctttgcgc |
| | | ttgcgttttcccttgtccagatagcccagtagctg |
| | | acattcatccggggtcagcaccgtttctgcggact |
| | | ggctttctacgtgctcgaggggggccaaacggtct |
| | | ccagcttggctgttttggcggatgagagaagattt |
| | | tcagcctgatacagattaaatcagaacgcagaagc |
| | | ggtctgataaaacagaatttgcctggcggcagtag |
| | | cgcggtggtcccacctgaccccatgccgaactcag |
| | | aagtgaaacgccgtagcgccgatggtagtgtgggg |
| | | tctccccatgcgagagtagggaactgccaggcatc |
| | | aaataaaacgaaaggctcagtcgaaagactgggcc |
| | | tttcgttttatctgttgtttgtcggtgaacgctct |
| | | cctgagtaggacaaatccgccgggagcggatttga |
| | | acgttgcgaagcaacggcccggagggtggcgggca |
| | | ggacgcccgccataaactgccaggcatcaaattaa |
| | | gcagaaggccatcctgacggatggcctttttgcgt |
| | | ttctacaaactcttttgtttatttttctaaataca |
| | | ttcaaatatgtatccgctcatgaccaaaatccctt |
| | | aacgtgagttttcgttccactgagcgtcagacccc |
| | | gtagaaaagatcaaaggatcttcttgagatccttt |
| | | ttttctgcgcgtaatctgctgcttgcaaacaaaaa |
| | | aaccaccgctaccagcggtggtttgtttgccggat |
| | | caagagctaccaactctttttccgaaggtaactgg |
| | | cttcagcagagcgcagataccaaatactgtccttc |
| | | tagtgtagccgtagttaggccaccacttcaagaac |
| | | tctgtagcaccgcctacatacctcgctc |
| | | accctgttatccctagatgacattaccctgttatc |
| | | ccagatgacattaccctgttatccctagatacatt |
| | | accctgttatcccagatgacataccctgttatccc |
| | | tagatgacattaccctgttatcccagatgacatta |
| | | ccctgttatccctagatacattaccctgttatccc |
| | | agatgacataccctgttatccctagatgacattac |
| | | cctgttatcccagatgacattaccctgttatccct |
| | | agatacattaccctgttatcccagatgacataccc |
| | | tgttatccctagatgacattaccctgttatcccag |
| | | ataaactcaatgatgatgatgatgatggtcgagac |
| | | tcagcggccgcggtgccagggcgtgcccttgggct |
| | | ccccgggcgcgactagtgggaggcgttcgggccac |
| | | agcggcccgttctgggtacttttatctgtcccctc |
| | | caccccacagtggggccactacgatcgatcgatcg |
| | | caggcgcaatcttcgcatttcttttttccagatgg |
| | | tgagcaagggcgaggagctgttcaccggggtggtg |
| | | cccatcctggtcgagctggacggcgacgtaaacgg |
| | | ccacaagttcagcgtgtccggcgagggcgagggcg |
| | | atgccacctacggcaagctgaccctgaagttcatc |
| | | tgcaccaccggcaagctgcccgtgccctggcccac |
| | | cctcgtgaccaccctgacctacggcgtgcagtgct |
| | | tcagccgctaccccgaccacatgaagcagcacgac |
| | | ttcttcaagtccgccatgcccgaaggctacgtcca |
| | | ggagcgcaccatcttcttcaaggacgacggcaact |
| | | acaagacccgcgccgaggtgaagttcgagggcgac |
| | | accctggtgaaccgcatcgagctgaagggcatcga |
| | | cttcaaggaggacggcaacatcctggggcacaagc |
| | | tggagtacaactacaacagccacaacgtctatatc |
| | | atggccgacaagcagaagaacggcatcaaggtgaa |
| | | cttcaagatccgccacaacatcgaggacggcagcg |
| | | tgcagctcgccgaccactaccagcagaacaccccc |
| | | atcggcgacggccccgtgctgctgcccgacaacca |
| | | ctacctgagcacccagtccgccctgagcaaagacc |
| | | ccaacgagaagcgcgatcacatggtcctgctggag |
| | | ttcgtgaccgccgccgggatcactctcggcatgga |
| | | cgagctgtacaagtaattaattaatgagcggccgc |
| | | gtttcagacatgataagatacattgatgagtttgg |
| | | acaaaccacaactagaatgcagtgaaaaaaatgct |
| | | ttatttgtgaaatttgtgatgctattgctttattt |
| | | gtaaccattataagctgcaataaacaagttaacaa |
| | | caacaattgcattcattttatgtttcaggttcagg |
| | | gggaggtgtgggaggttttttgacgtcgggacagg |
| | | attggtgacagaaaagccccatccttaggcctcct |
| | | ccttcaaaccgctgtggcccgaacgcctcccgtcg |
| | | acccatgggggcccgccccaactggggtaaccttt |
| | | gagttctctcagttgggggtaatcagcatcatgat |
| | | gtggtaccacatcatgatgctgattataagaatgc |
| | | ggccgccacactctagtggatctcgagttaataat |
| | | tcagaagaactcgtcaagaaggcgatagaaggcga |
| | | tgcgctgcgaatcgggagcggcgataccgtaaagc |
| | | acgaggaagcggtcagcccattcgccgccaagctc |
| | | ttcagcaatatcacgggtagccaacgctatgtcct |
| | | gatagcggtccgccacacccagccggccacagtcg |
| | | atgaatccagaaaagcggccattttccaccatgat |
| | | attcggcaagcaggcatcgccatgggtcacgacga |
| | | gatcctcgccgtcgggcatgctcgccttgagcctg |
| | | gcgaacagttcggctggcgcgagcccctgatgctc |
| | | ttcgtccagatcatcctgatcgacaagaccggctt |
| | | ccatccgagtacgtgctcgctcgatgcgatgtttc |
| | | gcttggtggtcgaatgggcaggtagccggatcaag |
| | | cgtatgcagccgccgcattgcatcagccatgatgg |
| | | atactttctcggcaggagcaaggtgtagatgacat |
| | | ggagatcctgccccggcacttcgcccaatagcagc |
| | | cagtcccttcccgcttcagtgacaacgtcgagcac |
| | | agctgcgcaaggaacgcccgtcgtggccagccacg |
| | | atagccgcgctgcctcgtcttgcagttcattcagg |
| | | gcaccggacaggtcggtcttgacaaaaagaaccgg |
| | | gcgcccctgcgctgacagccggaacacggcggcat |
| | | cagagcagccgattgtctgttgtgcccagtcatag |
| | | ccgaatagcctctccacccaagcggccggagaacc |
| | | tgcgtgcaatccatcttgttcaatcatgcgaaacg |
| | | atcctcatcctgtctcttgatcagagcttgatccc |
| | | ctgcgccatcagatccttggcggcgagaaagccat |
| | | ccagtttactttgcagggcttcccaaccttaccag |
| | | agggcgccccagctggcaattccggttcgcttgct |
| | | gtccataaaaccgcccagtctagctatcgccatgt |
| | | aagcccactgcaagctacctgctttctctttgcgc |
| | | ttgcgttttcccttgtccagatagcccagtagctg |
| | | acattcatccggggtcagcaccgtttctgcggact |
| | | ggctttctacgtgctcgaggggggccaaacggtct |
| | | ccagcttggctgttttggcggatgagagaagattt |
| | | tcagcctgatacagattaaatcagaacgcagaagc |
| | | ggtctgataaaacagaatttgcctggcggcagtag |
| | | cgcggtggtcccacctgaccccatgccgaactcag |
| | | aagtgaaacgccgtagcgccgatggtagtgtgggg |
| | | tctccccatgcgagagtagggaactgccaggcatc |
| | | aaataaaacgaaaggctcagtcgaaagactgggcc |
| | | tttcgttttatctgttgtttgtcggtgaacgctct |
| | | cctgagtaggacaaatccgccgggagcggatttga |
| | | acgttgcgaagcaacggcccggagggtggcgggca |
| | | ggacgcccgccataaactgccaggcatcaaattaa |
| | | gcagaaggccatcctgacggatggcctttttgcgt |
| | | ttctacaaactcttttgtttatttttctaaataca |
| | | ttcaaatatgtatccgctcatgaccaaaatccctt |
| | | aacgtgagttttcgttccactgagcgtcagacccc |
| | | gtagaaaagatcaaaggatcttcttgagatccttt |
| | | ttttctgcgcgtaatctgctgcttgcaaacaaaaa |
| | | aaccaccgctaccagcggtggtttgtttgccggat |
| | | caagagctaccaactctttttccgaaggtaactgg |
| | | cttcagcagagcgcagataccaaatactgtccttc |
| | | tagtgtagccgtagttaggccaccacttcaagaac |
| | | tctgtagcaccgcctacatacctcgctctgc |
| | | taatcctgttaccagtggctgctgccagtggcg |
| | | ataagtcgtgtcttaccgggttggactcaagacga |
| | | tagttaccggataaggcgcagcggtcgggctgaac |
| | | ggggggttcgtgcacacagcccagcttggagcgaa |
| | | cgacctacaccgaactgagatacctacagcgtgag |
| | | ctatgagaaagcgccacgcttcccgaagggagaaa |
| | | ggcggacaggtatccggtaagcggcagggtcggaa |
| | | caggagagcgcacgagggagcttccagggggaaac |
| | | gcctggtatctttatagtcctgtcgggtttcgcca |
| | | cctctgacttgagcgtcgatttttgtgatgctcgt |
| | | caggggggcggagcctatggaaaaacgccagcaac |
| | | gcggcctttttacggttcctggccttttgctggcc |
| | | ttttgctcacatgttctttcctgcgttatcccctg |
| | | attctgtggataaccgtattaccgcctttgagtga |
| | | gctgataccgctcgccgcagccgaacgaccgagcg |
| | | cagcgagtcagtgagcgaggaagcggaagagcgcc |
| | | tgatgcggtattttctccttacgcatctgtgcggt |
| | | atttcacaccgcatatggtgcactctcagtacaat |
| | | ctgctctgatgccgcatagttaagccagtatacac |
| | | tccgctatcgctacgtgactgggtcatggctgcgc |
| | | cccgacacccgccaacacccgctgacgcgccctga |
| | | cgggcttgtctgctcccggcatccgcttacagaca |
| | | agctgtgaccgtctccgggagctgcatgtgtcaga |
| | | ggttttcaccgtcatcaccgaaacgcgcgaggcag |
| | | cagatcaattcgcgcgcgaaggcgaagcggcatgc |
| | | ataatgtgcctgtcaaatggacgaagcagggattc |
| | | tgcaaaccctatgctactccgtcaagccgtcaatt |
| | | gtctgattcgttaccaattatgacaacttgacggc |
| | | tacatcattcactttttcttcacaaccggcacgga |
| | | actcgctcgggctggccccggtgcattttttaaat |
| | | acccgcgagaaatagagttgatcgtcaaaaccaac |
| | | attgcgaccgacggtggcgataggcatccgggtgg |
| | | tgctcaaaagcagcttcgcctggctgatacgttgg |
| | | tcctcgcgccagcttaagacgctaatccctaactg |
| | | ctggcggaaaagatgtgacagacgcgacggcgaca |
| | | agcaaacatgctgtgcgacgctggcgat |
| 90 | pMC- | acattaccctgttatccctagatgacattaccctg |
| | L + R- | ttatcccagatgacattaccctgttatccctagat |
| | TRAC1- | gacattaccctgttatccctagatgacatttaccc |
| | SSA48- | tgttatccctagatgacattaccctgttatcccag |
| | Anti- | atgacattaccctgttatccctagatacattaccc |
| | meso- | tgttatcccagatgacataccctgttatccctaga |
| | thelin | tgacattaccctgttatcccagatgacattaccct |
| | CAR | gttatccctagatacattaccctgttatcccagat |
| | (SSA/H | gacataccctgttatccctagatgacattaccctg |
| | MEJ) | ttatcccagatgacattaccctgttatccctagat |
| | Forward | acattaccctgttatcccagatgacataccctgtt |
| | homology | atccctagatgacattaccctgttatcccagatga |
| | arm | cattaccctgttatccctagatacattaccctgtt |
| | (735- | atcccagatgacataccctgttatccctagatgac |
| | 779; 45 | attaccctgttatcccagatgacattaccctgtta |
| | bp in | tccctagatacattaccctgttatcccagatgaca |
| | length) | taccctgttatccctagatgacattaccctgttat |
| | 5′ | cccagatgacattaccctgttatccctagatacat |
| | universal | taccctgttatcccagatgacataccctgttatcc |
| | guide | ctagatgacattaccctgttatcccagataaactc |
| | (786- | aatgatgatgatgatgatggtcgagactcagcggc |
| | 808; 23 | cgcggtgccagggcgtgcccttgggctccccgggc |
| | bp in | gcgactagtgaattcgggaggcgttcgggccacag |
| | length) | cggccctaaccctgatcctcttgtcccacagatat |
| | Reverse | ccagaaccctgaccctgccggttctggcgagggca |
| | homology | ggggttccctccttacatgcggagatgtagaagaa |
| | arm | aatccagggcctatggccctgcccgtcaccgctct |
| | (3200- | gctgctgcctctggctctgctgctgcatgccgctc |
| | 3233; 34 | gccccggaagtcaggtccagctgcagcagagcgga |
| | bp in | cctgagctggagaagccaggagcatccgtgaagat |
| | length) | ctcttgcaaggcctctggctacagcttcaccggct |
| | 3′ | atacaatgaactgggtgaagcagagccacggcaag |
| | universa1 | tccctggagtggatcggcctgatcaccccctacaa |
| | guide | cggcgccagctcctataatcagaagtttcgcggca |
| | (3171- | aggccaccctgacagtggacaagtctagctccacc |
| | 3193; 23 | gcctatatggacctgctgtccctgacatctgagga |
| | bp) | tagcgccgtgtacttctgcgcaaggggaggatatg |
| | | acggaaggggctttgattactggggccagggcacc |
| | | acagtgaccgtgtctagcggaggaggaggatccgg |
| | | aggaggaggatcctctggcggcggcagcgacatcg |
| | | agctgacacagtccccagcaatcatgtctgccagc |
| | | ccaggagagaaggtgaccatgacatgttctgccag |
| | | ctcctctgtgagctacatgcactggtatcagcaga |
| | | agtccggcacctctcccaagcggtggatctatgat |
| | | acatctaagctggcaagcggagtgcctggccggtt |
| | | ctccggctctggcagcggcaattcctactctctga |
| | | ccatcagctccgtggaggccgaggacgatgccaca |
| | | tactattgccagcagtggtccaagcaccctctgac |
| | | ctacggcgccggcacaaagctggagatcaaggcct |
| | | ctaccacaaccccagcacccagaccccctacccct |
| | | gcaccaacaatcgcatcccagccactgagcctgcg |
| | | gcccgaggcctgtaggccagcagcaggaggagcag |
| | | tgcacaccaggggcctggacttcgcctgcgatttt |
| | | tgggtgctggtggtggtgggaggcgtgctggcctg |
| | | ttatagcctgctggtgacagtggccttcatcatct |
| | | tttgggtgagaagcaagagatccaggctgctgcac |
| | | tccgactacatgaacatgacccctagacggcccgg |
| | | ccctacaaggaagcactaccagccatatgccccac |
| | | ccagagattttgccgcctataggagcaagcgcggc |
| | | cggaagaagctgctgtacatcttcaagcagccctt |
| | | catgcggcccgtgcagacaacccaggaggaggacg |
| | | gctgctcctgtaggttcccagaagaggaggaggga |
| | | ggatgcgagctgagggtgaagtttagccggtccgc |
| | | cgatgcaccagcatataagcagggacagaatcagc |
| | | tgtacaacgagctgaatctgggcaggcgcgaggag |
| | | tacgacgtgctggataagaggagaggacgggaccc |
| | | cgagatgggaggcaagcccaggcgcaagaaccctc |
| | | aggagggcctgtataatgagctgcagaaggacaag |
| | | atggccgaggcctactctgagatcggcatgaaggg |
| | | agagcggagaaggggcaagggacacgatggcctgt |
| | | atcagggcctgtccaccgccacaaaggacacctac |
| | | gatgccctgcacatgcaggccctgcctccaaggag |
| | | ggcaaagaggggatccggagagggacggggctctc |
| | | tgctgacctgcggcgatgtggaggagaacccaggc |
| | | cccatgggcacaagcctgctgtgctggatggcact |
| | | gtgcctgctgggagcagaccacgccgatgcctgcc |
| | | cctattctaatcccagcctgtgctccggaggagga |
| | | ggatctgagctgcctacccagggcacattctctaa |
| | | cgtgagcaccaatgtgagcccagccaagcccacaa |
| | | ccacagcctgcccatactccaaccccagcctgtgc |
| | | agcggcggaggaggcagccctgcaccaagaccccc |
| | | taccccagcacctacaatcgcaagtcagcctctga |
| | | gcctgcggcccgaggcctgtcgccctgccgccggc |
| | | ggcgccgtccatactaggggcctggactttgcctg |
| | | cgatatctacatctgggcaccactggcaggaacct |
| | | gtggcgtgctgctgctgagcctggtcatcacactg |
| | | tattgtaatcataggaatcggaggagagtgtgcaa |
| | | atgcccccgccctgtcgtctaaaccggtaataaaa |
| | | gatccttattttcattggatctgtgtgttggtttt |
| | | ttgtgtgagcgctagctgagactctaaatccagtg |
| | | acaagtctgtctgcctaaaaccgctgtggcccgaa |
| | | cgcctcccgatatcgtcgacccatgggggcccgcc |
| | | ccaactggggtaacctttgagttctctcagttggg |
| | | ggtaatcagcatcatgatgtggtaccacatcatga |
| | | tgctgattataagaatgcggccgccacactctagt |
| | | ggatctcgagttaataattcagaagaactcgtcaa |
| | | gaaggcgatagaaggcgatgcgctgcgaatcggga |
| | | gcggcgataccgtaaagcacgaggaagcggtcagc |
| | | ccattcgccgccaagctcttcagcaatatcacggg |
| | | tagccaacgctatgtcctgatagcggtccgccaca |
| | | cccagccggccacagtcgatgaatccagaaaagcg |
| | | gccattttccaccatgatattcggcaagcaggcat |
| | | cgccatgggtcacgacgagatcctcgccgtcgggc |
| | | atgctcgccttgagcctggcgaacagttcggctgg |
| | | cgcgagcccctgatgctcttcgtccagatcatcct |
| | | gatcgacaagaccggcttccatccgagtacgtgct |
| | | cgctcgatgcgatgtttcgcttggtggtcgaatgg |
| | | gcaggtagccggatcaagcgtatgcagccgccgca |
| | | ttgcatcagccatgatggatactttctcggcagga |
| | | gcaaggtgtagatgacatggagatcctgccccggc |
| | | acttcgcccaatagcagccagtcccttcccgcttc |
| | | agtgacaacgtcgagcacagctgcgcaaggaacgc |
| | | ccgtcgtggccagccacgatagccgcgctgcctcg |
| | | tcttgcagttcattcagggcaccggacaggtcggt |
| | | cttgacaaaaagaaccgggcgcccctgcgctgaca |
| | | gccggaacacggcggcatcagagcagccgattgtc |
| | | tgttgtgcccagtcatagccgaatagcctctccac |
| | | ccaagcggccggagaacctgcgtgcaatccatctt |
| | | gttcaatcatgcgaaacgatcctcatcctgtctct |
| | | tgatcagagcttgatcccctgcgccatcagatcct |
| | | tggcggcgagaaagccatccagtttactttgcagg |
| | | gcttcccaaccttaccagagggcgccccagctggc |
| | | aattccggttcgcttgctgtccataaaaccgccca |
| | | gtctagctatcgccatgtaagcccactgcaagcta |
| | | cctgctttctctttgcgcttgcgttttcccttgtc |
| | | cagatagcccagtagctgacattcatccggggtca |
| | | gcaccgtttctgcggactggctttctacgtgctcg |
| | | aggggggccaaacggtctccagcttggctgttttg |
| | | gcggatgagagaagattttcagcctgatacagatt |
| | | aaatcagaacgcagaagcggtctgataaaacagaa |
| | | tttgcctggcggcagtagcgcggtggtcccacctg |
| | | accccatgccgaactcagaagtgaaacgccgtagc |
| | | gccgatggtagtgtggggtctccccatgcgagagt |
| | | agggaactgccaggcatcaaataaaacgaaaggct |
| | | cagtcgaaagactgggcctttcgttttatctgttg |
| | | tttgtcggtgaacgctctcctgagtaggacaaatc |
| | | cgccgggagcggatttgaacgttgcgaagcaacgg |
| | | cccggagggtggcgggcaggacgcccgccataaac |
| | | tgccaggcatcaaattaagcagaaggccatcctga |
| | | cggatggcctttttgcgtttctacaaactcttttg |
| | | tttatttttctaaatacattcaaatatgtatccgc |
| | | tcatgaccaaaatcccttaacgtgagttttcgttc |
| | | cactgagcgtcagaccccgtagaaaagatcaaagg |
| | | atcttcttgagatcctttttttctgcgcgtaatct |
| | | gctgcttgcaaacaaaaaaaccaccgctaccagcg |
| | | gtggtttgtttgccggatcaagagctaccaactct |
| | | ttttccgaaggtaactggcttcagcagagcgcaga |
| | | taccaaatactgtccttctagtgtagccgtagtta |
| | | ggccaccacttcaagaactctgtagcaccgcctac |
| | | atacctcgctctgctaatcctgttaccagtggctg |
| | | ctgccagtggcgataagtcgtgtcttaccgggttg |
| | | gactcaagacgatagttaccggataaggcgcagcg |
| | | gtcgggctgaacggggggttcgtgcacacagccca |
| | | gcttggagcgaacgacctacaccgaactgagatac |
| | | ctacagcgtgagctatgagaaagcgccacgcttcc |
| | | cgaagggagaaaggcggacaggtatccggtaagcg |
| | | gcagggtcggaacaggagagcgcacgagggagctt |
| | | ccagggggaaacgcctggtatctttatagtcctgt |
| | | cgggtttcgccacctctgacttgagcgtcgatttt |
| | | tgtgatgctcgtcaggggggcggagcctatggaaa |
| | | aacgccagcaacgcggcctttttacggttcctggc |
| | | cttttgctggccttttgctcacatgttctttcctg |
| | | cgttatcccctgattctgtggataaccgtattacc |
| | | gcctttgagtgagctgataccgctcgccgcagccg |
| | | aacgaccgagcgcagcgagtcagtgagcgaggaag |
| | | cggaagagcgcctgatgcggtattttctccttacg |
| | | catctgtgcggtatttcacaccgcatatggtgcac |
| | | tctcagtacaatctgctctgatgccgcatagttaa |
| | | gccagtatacactccgctatcgctacgtgactggg |
| | | tcatggctgcgccccgacacccgccaacacccgct |
| | | gacgcgccctgacgggcttgtctgctcccggcatc |
| | | cgcttacagacaagctgtgaccgtctccgggagct |
| | | gcatgtgtcagaggttttcaccgtcatcaccgaaa |
| | | cgcgcgaggcagcagatcaattcgcgcgcgaaggc |
| | | gaagcggcalgcataatgtgcctglcaaatggacg |
| | | aagcagggatlctgcaaaccctatgctactccgtc |
| | | aagccgtcaattgtctgattcgttaccaattatga |
| | | caacttgacggctacatcattcactttttcttcac |
| | | aaccggcacggaactcgctcgggctggccccggtg |
| | | cattttttaaatacccgcgagaaatagagttgatc |
| | | gtcaaaaccaacattgcgaccgacggtggcgatag |
| | | gcatccgggtggtgctcaaaagcagcttcgcctgg |
| | | ctgatacgttggtcctcgcgccagcttaagacgct |
| | | aatccctaactgctggcggaaaagatgtgacagac |
| | | gcgacggcgacaagcaaacatgctgtgcgacgctg |
| | | gcgat |
| 91 | Anti- | MALPVTALLLPLALLLHAARPGSQVQLQQSGPELE |
| | meso- | KPGASVKISCKASGYSFTGYTMNWVKQSHGKSLEW |
| | thelin | IGLITPYNGASSYNQKFRGKATLTVDKSSSTAYMD |
| | CAR | LLSLTSEDSAVYFCARGGYDGRGFDYWGQGTTVTV |
| | CoDing | SSGGGGSGGGGSSGGGSDIELTQSPA1MSASPGEK |
| | Sequence | VTMTCSASSSVSYMHWYQQKSGTSPKRWIYDTSKL |
| | (CDS) | ASGVPGRFSGSGSGNSYSLTISSVEAEDDATYYCQ |
| | | QWSKHPLTYGAGTKLEIKASTTTPAPRPPTPAPTI |
| | | ASQPLSLRPEACRPAAGGAVHTRGLDFACDFWVLV |
| | | VVGGVLACYSLLVTVAFIIFWVRSKRSRLLHSDYM |
| | | NMTPRRPGPTRKHYQPYAPPRDFAAYRSKRGRKKL |
| | | LYIFKQPFMRPVQTTQEEDGCSCRFPEEEEGGCEL |
| | | RVKFSRSADAPAYKQGQNQLYNELNLGRREEYDVL |
| | | DKRRGRDPEMGGKPRRKNPQEGLYNELQKDKMAEA |
| | | YSEIGMKGERRRGKGHDGLYQGLSTATKDTYDALH |
| | | MQALPPR |

### Intersection of DNA Sensor Expression and Electroporation Timing

[0835] To evaluate timing of expression of DNA sensors (RIG-1, STING, 1F116, and AIM2) T cells were stimulated with anti-CD3 and anti-CD28 beads at a ratio of 1:2.5 (bead:cell). Stimulated cells were electroporated with the SA-GFP plasmid alone (plasmid control) or the SA-Donor in combination with Cas9 and AAVS1 gRNA (HR) at 12 hrs., 24 hrs., 30 hrs., 36 hrs., 48 hrs., and 72 hrs. post stimulation. Expression of the DNA sensors was evaluated after electroporation, FIG. 29A. A determination of the cell cycle phase was also determined and charted at the same time points, FIG. 29B. Percent GFP expression was quantified post electroporation, FIG. 29C.

### Example 14. Integration Mechanism Influences Expression of Insert Cargo

[0836] T cells were stimulated using anti-CD3 and anti-CD28 coated beads for 36 hours and electroporated with 1 ug donor plasmid having an anti-KRAS TCR alone (control), or donor plasmid having the anti-KRAS TCR in combination with 1.5 ug Cas9 mRNA and 1 ug AAVS1 gRNA (HR), or for HMEJ, the plasmid containing the anti-KRAS TCR, Cas9 mRNA, anti-AAVS1 gRNA, and Universal gRNA. Both the HR and HMEJ cargo is the SA-GFP construct integrated at AAVS1. Both the HR and HMEJ cargo is the MND-KRAS TCR with 1 kb homology (for HR) and with 48 bp homology (HMEJ). 7 days after electroporation percent GFP was analyzed, FIG. 30A (1 Kb) and FIG. 30B (2.6 kb). Results show that at least for larger cargo, the HMEJ construct is the preferred delivery mechanism.

### Example 15. Effect of Homology Arm Length on Integration by HR and HMEJ

[0837] Donor transgenes with varying homology arm lengths (48, 100, 250, 500, 750, and 1000 bases) flanked by “universal” gRNA cut sites were generated and used to transfect cells along with Cas9 and AAVS1 gRNA post stimulation. FIG. 33 shows expression of GFP in both CD4 and CD8 cells after knock in. Plasmid only (donor transgene with no CRISPR reagents-episomal expression control). Data indicates that as the length of homology arms increase, the donor insert expression increased.

[0838] In a second experiment, T cells were stimulated and later electroporated with 1 ug donor only (control), SA-eGFP-pA (HR), or SA-eGFP-pA (HMEJ) constructs, each independently comprising homology arms of length 48, 100, 250, 500, 750, and 100 base pairs. Cells underwent a second stimulation and on day 7 were evaluated for percent knock in via flow cytometry, FIG. 34A. The same data is tabulated in FIG. 34B. Results show that the HMEJ construct has higher knock-in efficiency as compared to the comparable HR donor particularly at the lower homology arm lengths of 48 and 100 base pairs.

### Example 16. Additional Stimulation

[0839] To evaluate any benefit in performing an additional stimulation as described in protocol 2, T cells were activated and stimulated and electroporated with constructs comprising an SA-eGFP-pA (HR), or SA-eGFP-pA (HMEJ) donor comprising homology arms (HR) or an HMEJ donor (denoted as SSA) that target AAVS1, electroporation method previously described herein. Cells were exposed to an additional stimulation, about 30 minutes after electroporation. GFP was measured at day 7 post electroporation. The additional stimulation assists in overcoming any cell expansion deficits in cells post-electroporation, see for example FIG. 25A and FIG. 25B. Additionally, results show that the additional stimulation increases the fold-expansion of SA-EGFP-pA (HMEJ) modified T cells, see FIG. 35A and FIG. 35B.

[0840] Additional stimulations can be introduced into a clinical workflow as outlined in FIG. 36. For example, an additional stimulation can be performed after step (2) and/or after step (3).

### Example 17. Treatment of Cancer Patient Using TCR-Modified T Cells

[0841] CRISPR-Cas9 system can be designed to transfer a TCR gene into autologous primary T cells from a patient of cancer. The TCR gene can be designed to have a high affinity to a target antigen expressed by the cancer cell identified in the patient. The TCR gene can be driven by a strong promoter to compete with endogenous TCR expressed by the primary T cells, for example, cytomegalovirus (CMV), murine stem cell virus (MSCV) U3, phosphoglycerate kinase (PGK), O-actin, ubiquitin, and a simian virus 40 (SV40)/CD43 composite promoter. The patient will be administered with the TCR-modified T cells.

[0842] Autologous CD3+ T cells will be obtained from peripheral blood of the patient according to the protocols described in Example 6. The isolated T cells will be cultured under standard conditions according to GMP guidance.

[0843] At least 30 min before electroporation, CD3+ T cells will be stimulated using anti-CD3 and anti-CD28 coated beads. Beads can be plated at ratios of 2 beads per cell or 1 bead for every 2.5 cells. Electroporation will be performed in two steps: first, the CD3+ T cells will be electroporated in the presence of Cas9 mRNA; and 6-24 hr. later, the cells will be subject to electroporation with the TCR gene-containing minicircle construct and gRNA. gRNA will be designed to target a safe harbor site of human genome, like AAVS1 site. Stable expression of the TCR gene will be validated by next-generation sequencing 2 weeks post-transfection. The cell viability, transfection efficiency and transgene load in the electroporated T cells will be assessed. Certain measure will also be taken to minimize any safety concern.

[0844] After validation, the TCR modified T cells will be infused to the cancer patient. The infused TCR modified T cells is expected to expand in vitro to a clinically desirable level, including the number of TCR modified T cells in the peripheral blood stream of the patient, and the expression level of the transplanted TCR gene. The infusion regimen will also be determined based on clinical evaluations, for instance, the stage of the cancer, the treatment history of the patient, the CBC (complete blood cell count) and vital signs of the patient on the day of treatment. Infusion dose may be escalated or deescalated depending on the progression of the disease, the repulsion reaction of the patient, and many other medical factors.

1.-113. (canceled)

114. A method of generating a population of engineered mammalian cells, the method comprising:
(a) contacting a plurality of mammalian cells with a polynucleic acid construct comprising an insert sequence flanked by homology arms, wherein each of the homology arms comprises a sequence homologous to at most 400 consecutive nucleotides of a sequence adjacent to a target site in the genome of the plurality of mammalian cells;
(b) cleaving the polynucleic acid construct;
(c) generating a first double stranded break in the genome of the plurality of mammalian cells at the target site and generating a second double stranded break in the genome of the plurality of mammalian cells at a second site; and
(d) inserting the insert sequence in the target site, to thereby generate a population of engineered mammalian cells.

115. The method of claim 114, further comprising expanding the population of engineered mammalian cells.

116. The method of claim 114, further comprising contacting the plurality of mammalian cells with a DNase.

117. The method of claim 116, wherein the DNase is selected from the group consisting of: DNase I, Benzonase, Exonuclease I, Exonuclease III, Mung Bean Nuclease, Nuclease BAL 31, RNase I, S1 Nuclease, Lambda Exonuclease, RecJ, T7 exonuclease, restriction enzymes, and any combination thereof.

118. The method of claim 114, further comprising contacting the plurality of mammalian cells with an exogenous immunostimulatory agent.

119. The method of claim 118, wherein the exogenous immunostimulatory agent is B7, CD80, CD83, CD86, CD32, CD64, 4-1BBL, anti-CD3, anti-CD3 mAb, S-2-hydroxyglutarate, anti-CD28, anti-CD28 mAb, CD1d, anti-CD2, IL-15, IL-17, IL-21, IL-2, IL-7, or truncated CD19.

120. The method of claim 118, wherein the exogenous immunostimulatory agent stimulates expansion of at least a portion of the plurality of mammalian cells.

121. The method of claim 118, wherein the concentration of the exogenous immunostimulatory agent is from about 50 IU/ml to about 1000 IU/ml.

122. The method of claim 118, the contacting of (a) occurs from about 30 hours up to 36 hours after the contacting with the exogenous immunostimulatory agent.

123. The method of claim 114, further comprising contacting the plurality of mammalian cells with an exogenous agent that modulates DNA double strand break repair.

124. The method of claim 123, wherein the exogenous agent that modulates DNA double strand break repair comprises a protein.

125. The method of claim 124, wherein the protein is selected from the group consisting of: Ku70, Ku80, BRCA1, BRCA2, RAD51, RS-1, PALB2, Nap1, p400 ATPase, EVL, NAC, MRE11, RAD50, RAD52, RAD55, RAD57, RAD54, RAD54B, Srs2, NBS1, H2AX, PARP-1, RAD18, DNA-PKcs, XRCC4, XLF, Artemis, TdT, pol μ and pol λ, ATM, AKT1, AKT2, AKT3, Nibrin, CtIP, EXO1, BLM, E4 orf6, E1b55K, and Scr7.

126. The method of claim 114, wherein the plurality of mammalian cells are cultured in vitro or ex vivo in a culture medium, wherein the culture medium is substantially antibiotic free.

127. The method of claim 114, wherein the insert sequence is introduced into the plurality of mammalian cells using a plasmid, a minicircle vector, a linearized double stranded DNA construct, or a viral vector.

128. The method of claim 114, wherein the insert sequence comprises a sequence encoding an exogenous receptor.

129. The method of claim 128, wherein the exogenous receptor is a T cell receptor (TCR), a chimeric antigen receptor (CAR), a B cell receptor (BCR), a natural killer cell (NK cell) receptor, a cytokine receptor, or a chemokine receptor.

130. The method of claim 128, wherein the exogenous receptor is an immune receptor with specificity for a disease-associated antigen.

131. The method of claim 128, wherein the exogenous receptor is an immune receptor that specifically binds to a cancer antigen.

132. The method of claim 128, wherein the exogenous receptor is an immune receptor that specifically binds an autoimmune antigen.

133. The method of claim 128, wherein the exogenous receptor is a TCR.

134. A method of making an engineered T cell, the method comprising:
(a) providing a primary T cell from a human subject;
(b) introducing, ex vivo, into the primary T cell:
(i) a nuclease or a polynucleic acid encoding the nuclease, wherein the nuclease is a CRISPR-associated nuclease;
(ii) a first guide RNA or polynucleic acid encoding the first guide RNA, wherein the first guide RNA targets a sequence in a TRAC or TCRB locus of the primary T cell;
(iii) a second guide RNA or a polynucleic acid encoding the second guide RNA; and
(iv) a polynucleic acid construct comprising a sequence for insertion, wherein the sequence for insertion comprises a sequence encoding an exogenous T cell receptor or chimeric antigen receptor, wherein the polynucleic acid construct comprises a first short homology arm and a second short homology arm that flank the sequence for insertion, wherein the first short homology arm and the second short homology arm comprise sequences homologous to sequences in the TRAC or TCRB locus of the primary T cell, wherein the first short homology arm is less than 50 base pairs and the second short homology arm is less than 50 base pairs, wherein the first short homology arm and the second short homology arm are flanked by sequences targeted by the second guide RNA;
(c) producing a double stranded break in the TRAC or TCRB locus of the genome of the primary T cell, wherein double stranded break in the TRAC or TCRB locus is produced by the CRISPR-associated nuclease and the first guide RNA, wherein the double stranded break is between a first sequence homologous to the first short homology arm and a second sequence homologous to the second short homology arm; and
(d) producing two double stranded breaks in the polynucleic acid construct, thereby generating a cleaved polynucleic acid construct, wherein the cleaved polynucleic acid construct comprises the first short homology arm at a first end and the second short homology arm at a second end, wherein the two double stranded breaks are produced by the CRISPR-associated nuclease and the second guide RNA;
(e) inserting the sequence encoding the exogenous T cell receptor into the primary T cell genome at the site of the double stranded break in the TRAC or TCRB locus by homology mediated end joining.

The application's sequence listing, which the Patent Office published only in electronic form, follows.

SEQUENCE LISTING (91 sequences)

SEQ ID NO: 1 - DNA, 18764 bp, Homo sapiens
gactcccaggcccgaggactcctggaagggaggtgagtgtggcgctgaggaagcggcgggacggatgcgagcccgggaggagcgcgctggggggccgcaggcgggggatgtggcgcggtccaggcccgtcgcggcctcgtcctgacagggacacctgcgggatcgtccttccaggatcgcctgcgggcctcgcgggccgatgcctcgggtccccctccggcctcggtttctccgcgcagcggggcggggcgggggcagcgcgggtctcaaagctgcctgcagggggcgcccgtgagcggcgcggccggagccggagacccagcggccgccgagacagcgggagccggcgtgcgagcggcaggtcagccggggtgctaggtctggcgtgcggggtcctgggtgccgggtccggggtgcggggtgccgggggtccggggctggtggccgggcggcgtggggccgtcgggggtgcggggccgggaggactgggaggctggggttctgctcccctcagggttcctttcccgccgccccgagaccagttccccggcgcggggtccgagtcctgccccgcggcggctgccggcactgcctgtgaagggcccaggcacagtcacgtcccaggcgcagttgcggcgccgcgtgcgggaccctccgagctgtcccaaactgcaccggaaggcgcgcaggggtaggcggggagggaaggcaagtgcggcggccggcgcggcgcggggtgcggagccgcaggtagcgggcggggagcgtccgtccgtcagtccgtccgtccgtccatgcgccgcagaccggccccgcgcgctcgcatgaaccttcgcgagctcctccagcagggatggaccgggggcgcagaggcgcttcctgaggggtggcgggccgggccccggggcgagggagattccccaggtggaggagccgggcggagaccggttccccgggaaggtgaggcgcgggcagagatacccgagcgcccgggacgcgccgagaaagggggaatcaggaacgctgggccgagcgctggcgtcttccgtggacagtggtggcgggaactgggtttgggggacccaggagacgacgggggacggatgggggtgggtgcgcgcctcggactggccccggccgtctgtctggctgcccggagcggaggtaggaatggcgggaatggtggcggctctcgagggatttggcgcaaggcggcccaagggcttgaggaggaggccgcgggccggcagagctgaggtccctgtgtcccgcactcagactttagttgccccgactgtaccatgggaggaagagggagacccagggctgggtcctaggctgggggagtcggggccctgcaaagacgcgcaggtgtttgtggcccttgttggagggtgagccgcaggtcaagccagccctccgtcgccatcctgaagcacctcctctcttgggctctgccacacacagggccttctcccctattgccaggtgctcaggccgcctccaccctgcctctgctgccggctccccctgggttccccggcggggcaccctgccgatactccatgacgcgccagggctgccccagggtgccccagccctggggaccatggtggagggttctgtggagcaccgcgggcctgggaagctgttgcggggtcggggcttcctcactggccctgctttggccgttcctggaggccttgggtggggctgggaaggccgggccctgtgggcagcaccccccccccccccgcccaacatcccggcagatccatggcaggggcgcctcacaggctggtccacggccacggtgtcagtccctccttgttctgcgcttgctttttggggtctcccagcctctccctagtcctagagtttctcaggcaaatcccagccactacccctccatccgtgtcccctgtttccccagtgctgagctggctgagctgtgagctttcctgctccttgcctcaggaagccaggggcagcccagtcacctctggccagaggcgggccttaggccaaggctgacctggctggtctgagagctgtgctgggcttcttcccatatcagtctgtgaattacagatccccaaatatgccctgcgtcgcgatggaggagggcaatcaatggcaatgactgcctcatgggcaacgcgatgtgctggagatttcagtgctctcgtctgggttctggtcttgcctcctcgacccactcgctgagcaggttgctgtcccggggaatctgatatctcatctgtagaacaaggatgatgatcttagcaatgcctaatgtggaaaggccttggcttgggagcaagtgggggaaggtttagggcagaccagagggccggtgaggggtgtgtgctggagcggggaacccgggagggagggtgttaggcttgagggtcaggggacaccacagggattgctgttggcagagggacatatgaatggtagttggcctgggagccagcatgtgacttgagagcatcacgtcctgcaaagtccaggtgaggcctgggcagtgcctgctgtgtgggaccacagcccctggtggctctcagctgtgtcctgacactccaaagaaggtcttagtaccctctcacagacctaatacccgagccacctaaccccaaatgagctagaactgccttcccaaccgtgtttgcggggtctgtcttgtctattgcagcgcaaacagagccctgagcacgcaggagagcagaggaaggacagacagaagatggatggatggatgaaggcgggaagcacaggctgaggggatttagggcatgtgtggtgggggtgctgtggagaggagactgcacaggcaggagctgagctggtgaatgggagggttctagctcccagaagggtctgggccattgacaggaggggcttggtcctaggaggtgggtggtccagaggttgcaaggagcagaggagcccagatggggaagggaatggagctggggtgcagagaggagcccccacacaactgcccacatcctgtgcagaacctggggctctgggtggtgggaagaggcagtttcatggcggaggaggcctgggcccctgcagcctggactccatggatctggccagggactggggaggatcaggtggagagaggagcagcagagcagctgcccctcgtcccagcacaggggatgatgggagcccagggaaggcaggaccctggcttcgggcattttctctgctagaatctctcgatacctctctcccttcaccttctcctccaagtctcacccagatgatgtttctgtgagttgccatggggattctctcaccaccccccgccaacaccccgcaggggaagcttgttccaggagtcactgggcaggggctgctgctgctcttctgtgcccactcctcggatgtgccgctgcagccctggtctctggcatcggccgtcacctggtggagaggctgccggagctggccaagcagagggaggccgatggtgccacttggtgtctcctctggcatctgggcaggagacttctccccagaggccccgggctggtctgcccgtgtcacaggaggactcgcctctggtccctcagtggcctctgcaaaccctgagccagcctgggggaggctgctcagtggggaagaagcagtggccaggctctgcttggtcaccctgccctcctgtcagcctccggggctgcctcgtcgcacctgcccagggacccaacagccggtcctcacccctcccatcctcattgcagccaccctggggcattgtgaggccctgcacccagcactgccccttcaagcctcccacagggtcccgcccaggactcctgggctctgtgtccgcggggccatctagaaacactcccttgtccccccttcagcggcatagtacctgttgcccgccatctgagggaggtgcaggtgccaatccttcacgtgacgtgacgtggctcaccacagcctgtgtacatgtgagcagccgcgtgcagaggggaagctctgcctgggcctcagggactgtgacatggagcaggagccgcccccagccaagctgctttcagcacagcgtgggcccccagcaccttggtgcggggtgcggcccctcggaggagggctgtcaggtgaagcctcgtgtgagggggtgagtggcccccaggcggggaggagggggtgctgtggccttcctggcccctagcctggacacatgggggtgtggggagcaggagctggggcccccagcactggccccggggctgcgatgtgggggctgctctgtgaggcaggctcagagccttagcctccagctgcagggagctgggtcttggccccatcttgcccacatcctgccaccaggagcagagagctgcagctgcacccgggctgtgggggagggatgccaggtgtatctctgggtcccgggcccagcctgcacccagcgcctgaagtaagggccaccgggcagccccggaggtcaggagggaagtggagcccgtgctgggtggctgcttaccactgggcagtgaggaaggcacctgcgctgatgagtttggaaggggtatggggatcctggggccctgggttctgggaggttcatgcccaggcccccctgggccatcccaaaagccagtcatagtggggcccacaacctgccgtgccctgccgagctcccgcaagccacttgttgatgcttctcagtccaccccatgcctctcaaccgtttcctcctagactaggtctcttcatggcgtttctgggagaattcctcagtactagcttcagatccccagtcgtctcttccactgtacgtgtgcctgaagctcaccacatcccttacttcagtccttctatttttcagtccctggattttgtattatttcttgttcatatccacctgtccttgtttcatttccgccagtcggttcagaagttctcattcttgtctacggatgccattcctttctttgcctctttggagattctaaaggtctctgaaatcattattagattactgtattaccttccttcctactggaatgaattcacctccatgttttttattctgttgcttacctttcttagccttcatatacctcttgcgctttgaaattgatttgcgactcctcttagctgagccaatgttgtggagacagggagtggcctgcagtgcctgaaactgcagggcagcagccgcctcccaggaatgtcctgggtcctttcctcctttgaggtcccctgccatatgctcagatggggccaggcacagcaacgggggcacacctccctttggcccagcagttggggtgctgccaggcctggtggaggtacttggtaaacatttgttatggaaaagcagcaggagggttctaaggctgggattctggagcccaggaacaggccaggcatggctggagcgggtccgagtccgtgcactgtgtcctgtatgttgctcttagccgcactcaggagcagatgtgcaggtcactgcctagaagctggtgggcacctccgtgcagcaggctctggggggtatagccaccatctgggcatgtgtacagagggccttgctagtgcgacatatgaggaaccagaagatgtgtgggttttgattaaatggagttttaattaaagtggccaggttgggggaggtgaggaggaaggcaggaagcagcagcagttttgagtctgaccgcgtggaatcctataaggtggttctttcaagaggcattatgcacattccgcagcatgtgtcccctgtctgtatggggcagcatctgccctctgatctgtccccaacaaggggtaatcacagagaagtattacattattaatatttaatttcccctcctggttagcaacagatgactcaaggagtaattagatgcacagagccaacagagagggataggaaattgccagatcctggccccgccccctccccggggcctctgaccttcctgtcactctgggaggcttctgagggaggggagctggaggcccaggagccttcctgctgctgtgctctctgtgcgcacggccgcagccctacaccaccttccagtgctcttggtgaggctgagagaggtcgcttcgtgcctttgggcctcagtttcctcatctgtaaaatgggcttcctgggaccagcaagatcacagatgacagtcatttcccaagctcctaagcaggctgcacaagctgtgtctgagggtccagtgcagtgcctggcctctaggcaggtgccccctgggacgcgtaaggtttggcagctcagcagtgactggcatcgtggccagctgactctgtgttgctccccagttacggtccacgacacattagtagcttgaaactgggcacaaggggagaatttacaccacagaaatcaggcaaagcctgtaagtcagggtgcccccggccaggagctgatttgccagcctacggctgggtagctcccaacctttccccaatgaatgcactcctcttcccctgtctgccccaaaggtgcctctgactccactgatctgctttgctcagggccgagaaaggcacagctgagagtggattctggcttggcaggggcccaggttgcctgtgggtccgggcaagcctcacccgggatgtgctggcagcagctgggagagcctgcaggagtgcttaaggaggggctgagggagaggacgggcagcgaggtggcctgtgtggaccctgctggcaggagccgtgggtgtctttagccccgtgtgaggccggcctgggcagaggggtctgttgctgtcactgaggctggtgggcagcaggaaggtggcttcagtatagtcaagaaggttatcggtatctagtgctgtttagcatggggacccacagcacagaaggtggggagaccctgagaacgggggtacacaggcaggtacccagggctgccagggaagccttgccaaacagaggccctggtcaggcttctcccaaactgggcatcccagctggcatggcaccagtccagcccgtgaggcaggcgccgatgatttgaccccaccagcagggctctgggtgatgggactggggagtcctccttcactttggcagacgtgttatgttccaccttgtttgcccccagcaaggcccttgaatctggagcgtggtctggggctgcatcagccttctagcctgggatggtcagattggcagaaggctgtggcatccttcaatgcagatgccctagagagggccgtggtgggaggcaggatccctgggtagaggcggctcctcagtggcccactgggcctcactggacagtcgcctgttgctgctgctggtggtgctgggcctgggagtccaccttggagccacaggccaggcacctgggtgggaggcagcccggggccagcaccagctccacttgtacctgttgggcaggggctatcgtgagtcaggtgggccctggtgagtactgctcagggagagaggccaagagcatcagggataactgtgttccttgagtgtggccagggatggtgccaggagagctggtctggtgcatccctgccaacgacacactttgtgaatggctgcctggcaagtgctccatggaaagcaggggcttgggaggactcggccctctccagctgctgcaggccctccgttgctgcagggtttctggctctgctctctccttcctcctcctgcttctgtgtcaatgctccattcccaggctcctagtaggggcaaaagggcctgctgggtgcaggagaacctccagtcccaggtatggctgcagcccgtgccaatcctgttccagccacttgaggtgccgacagcattggagttggagggaaagttggggtctgtgtgtttgagctctgtcacatggacaatggggtagaggggagcctggccctttgaacagggctcaggaccaggagtgacttcctctccaggttgccagtcctgctccatccctcatgtcctggaagagagagagagacgaggtggctgcccgagtccacgtgaaaggcagcctctgacctcttgtccccaggcaggtggtggcggctggcaacacactcatagggccccatgagggttcaggattggagggggtagatttgggggcctcttagctctcaaagaggggcaatttaacgggcagaggtccatttggatccagaccattcacaggctcgaaggggacactgggagttggggctgggctcaggcctgctggggaaccaaaacttctgcttctgaggggtgtcagtaattccattttgactctgggggagccattttaaatctgtttatttccttctcatagaatcatgggtgagagctggcatggcccctagaggtcatttggggtccagctgcctcaccgtatcaatgaggaaactgaggcccagaaaagaaaagcatttttgcccagagtccctcagtgagtcctggttccgtacctgctttctgccagggaccaaactcccgttagtcattcctggtgtcagccaggcagaggagcaggtgggggagagggcgtgggaggagggaggtgaggcagctccctccgagtggaagctcacagtcagctgcagcgccgcccctgccctgactgcagctgactggcaggggcacctggaggcagcgggttcgggcgcagtatgagagggcttaccctctgcggcagtgggagacaggaccaggcagctccccacatccttccacatccgagctccaggggtctctggcttgtcctttcacagggcggctggtgtcccttaggtgggtgctggtagttcctgggagagttgacgggatggagcaggccaggggggctgagaagttggcctggcgagagaaggtgggtgggactgggagagcctgggcagggaggggcctttctgggagggagtgtcatggggctggccgagatccaggacccaggagactggccaagctgccacaggaggcctgagaggctgagcatgggggggccaacactgacagactttaacaagtttctggctcccccaggaaaaaaacagaccacatctgatccttggccctgagtccagagtgggaggcaccgtgacaacaatgcgcagagcagggaatgcagggagccatggatagtgctggggtgagctggagtcctggcaggggcccagctagggcagtactcattctgcagagcctgggagaaggggctgcctccttgggaggggtttgtgtgggagtctcagcgggaattctattggaccaggggaaccagccttgctcagtgacttctctgggtgtcctcctctaaagtgagggtcaaattcccacctctctcgcctcctggctatgaccacagcagaccaggcagggcatggggctaggcggggtcaggggccatcctcaggctgacacctggcctgtgggtagggtgggatctgaaactatagggtcttcagggggccaagtgtggggtaaggggtggcactttccgcagggctcgccctctgcagatggttcagcttctcatcggctgtccctttgcaggtgcctcaggaaccctgaagctgggctgagccatgatgctgctgccagaacccctgcagagggcctggtttcaggagactcagagtcctctgtgaaaaagcccttggagagcgccccagcagggctgcacttggctcctgtgaggaaggggctcaggggtctgggcccctccgcctgggccgggctgggagccaggcgggcggctgggctgcagcaatggaccgtgagctggcccagcccgcgtccgtgctgagcctgcctgtcgtctgtggccatgcccatcatgggctcctcggtgtacatcacggtggagctggccattgctgtgctggccatcctgggcaatgtgctggtgtgctgggccgtgtggctcaacagcaacctgcagaacgtcaccaactactttgtggtgtcactggcggcggccgacatcgcagtgggtgtgctcgccatcccctttgccatcaccatcagcaccgggttctgcgctgcctgccacggctgcctcttcattgcctgcttcgtcctggtcctcacgcagagctccatcttcagtctcctggccatcgccattgaccgctacattgccatccgcatcccgctccggtgagcagggccggggttacatctgtgcaaaggctgttggtgcccaggctttggtctgtgcccggagccagggtgagcctgggatcagggcctggtctgcagtgtcagcatggtgagctggcgacggggccccaggctcagcaggggctccccagggccagcacgtggccagcagtcatgccgaactgactgacccctatgggcgcagggcagcctggccctcccaggcggcctgggttcccctaggctgcctgaggccaactgtgctctgctttttggcagatgagtgtggccagggtctggcattgggcttagcagggagctgtggtcccagtgacccacgtgctgccagcgggtgtgtctgggccattcctcacacacaagcaaaacttcccggatgatgctggggtggagtggggagccaggggaaaccataggacctcagagttaggagccgcccgccacctgccttcccccagatcctctgggccagccttgcagtgtgcacattaggaaaatgacccagagaggggaagtgacttggttgaatgccacagtgagtcacttggacctatatgcaaattctgttgctcctcaagtcaccaaggactcatcgtcttagaggcagccagtgtgctcaggggctggctgttggaggggatttttatggtgaatcttttgtgaagtgacttcagccaagtaattgtgcaaatgaagattttcccagaggctgaattactcggcatggattccacctacccaggccatagatgaggctagaaagtgcatccctcccttggggacgtcagaggccttctgccccacctcctggcccctctgccacagagctgggttccacagcctgggtggttgtgggccctgaggccatgtatgaggcttgaggtggtgcctcttgagagtcagggagcagggtgcaccatctctgcggtgaattatctgaaactggtgggtgcctatctaaagaggaagccacagcaggttgagggtgccccagcaggaaggaggacccagctagatgagcaaatggaaatttagagcgtcaaagccaaggggcccttagaggtcatttcctctcatcttcgggatggaaaatgagcctcagagaagacagccagctgtttccgggccacacaacgagttggtagtggagctggggcgagtcctggaaagaaatgtggcctgatccccactgtgacttcagtcactggggagcggtcatgagcagcctgtctcgcagagcctgcaccaggtggctgtccctgtcacctgggctctaagtgggagcaggagctgcactgggctgctccagggaaggggaggaatctggacctcacactgccctgtcagatgctctctatcccaggagagtctagaaccctcggcaaaggagaaggggaccctggccagccctgagaggggtggaattagggattgtcggactccaagtgcagtctctggtgagcctccatccattgctctgcgacgggcagagcagagtttaggttcgtccagtggcagctcagaacacggaggcccaggaggggccctgtctgcaggtgcccaggtgggccagagaacaaagcactggaggggacttcagggaaccaagctgagtctgcacactgatgggatgctctatggggaagcagaggccaagctctcacttttttctctgattcaaagggtatgatcagggctgccgttctcaatttaaaggagctcgactttttttctcttttgtctctccctttccttctctgttttctgagagttgagagaatgactccctatgtagtaggacaggatgtgctgtgtggctatggaaagttagctgcctctctctgggcccatttcctcatccataaaataggacaagtctctctgcccctctgagctcacaaaggtgttctgaaggtccagtgagtggatggggtgacagggaccctgaggagggttggaggcgtggggagggtggggattcagatctttgggttcagagccatggacctgccccctatcctctacccatctcatcccaacttccttggagctggaccttagttccacccagaccttgagccatttgactctgctccatgaggctctgcaaggcttaggctggtctcttctgcagggggccctggagaggatgacgacgatgatgttcatcctcccttgagggcagagagctttgcagttgccaaaggatgtcagctcagcatctcctgtcatcctcttggcctgcattgtggccaggcggatgttctgaccctcctgttactcacaaactcatggggaggccagagcagggaaggacatacgagtgtctcctgatgtggatggactccagggcccttcaggctgttcctggcccgcaggtcccttcgctttcctgttcctcagggcccctgggcctctgggcatgtggaggtgtccatgtgggctcccgagagcaagcggggtatgaaaggaacttggtgacactcctggccggcgctggagtcacagcctgcctcaggatcctccctcctcctttctcagctgggaatccagcctcctctacgtgccgtttcctgctccactcagaaaggtccattcggctagccctgggtctagcctcaggcctgccccactctccattaactttttttttaaaaaaaagaactcagttttggaaaaatctgttattttccaagttcagggaacctgttgggctagcacagggcctagtcgaggaactctgtgagaaagacttcaggccagaggcagagatgtagctctctgtgttcccagaggatagggaattcagggtgagagacacaggcttctttttccagttcccaggggatttttgcctcactgtcccctccctggctctcacagcagcccttggtggatgttctcgctggtttgaggaacaggccaaggtgcaggtggcagctggtggtgaggcccgaagtcctaacacttctaagagggcaggattgggagagagggctccctggaggaggtgtcacccagtgggtcttgcaggacgggcaggcagggtctcactggcatgagtgtgggggcaggtgtgtcaggaggggggcaaagcctgggacaagaccctgaggaaggaatgagcatgtgagcactgggtagggaagggtggcctggctgcctagtgacagagagagatgaacagagtgggcaggaaaggtggaggccaagtcaggcctgttcgtaccaggggaaggaatggaggtttccctgtgggtccatggctcttcaattcttggatcaatgactcctttggacaacttaggaaggctccacctactcctcaggttgggacatgtgcacataaagccccagctggaatcatggggcatattcttggaccatagggtgagcccccagtgtgggtaatggagatccccagaaaggggcagcctgcaagccgggggacacagagctgcagagggcacctccacaaagggtgggcagcagctctgggacccacattctctgacatgcctgggcaccccagagtggtggtgtgtcacgctagacagccttggcatcccttccagctggatggtcaatgtttggggtctaagacggcaagatgtgagtgtgttggtcacagatgcagcccaggatatgctgctgggcctggctgaggctcagctgtgattccatttgggccctgatgctgtccccaccccgtgggcaccagggtccagggctctcagcctatggagatttcttttgaataaacttagtctatttgcaatttaagaaaaaaaaaagtcatgttttgcccactctaaaacattaaaaaggaacaaaagagtatagtatagtagaaagttgtcctccataccccctgtcccccaccctcagttccctgcctgcaaggccatgttaagaatccttccagagatattctttgcatatataagcaagtgctattaatgtatgttttgtttctgtccccacacgggactttctttgcagagtacggtggaagactccccttgtgggttcccttttctgtacaagtcaacaattggacagaccagggatttccatactgtgttcccagaagccttcgggttggctctggtgtccccaccaattcactgattcaataaacatttaataagccccttcccttccccagcagcttcacctctgtgactgcctgggaatgtgggcgacaaggtttgctgctgagaacagtttgaaaaccagcaaagcaggtggcccagggcccaggcagctctgcaacacccctgtggctgcttggctctgctctgttgcctcaaatgacaggaaactcactattgcctgaggcaggccatctctcctgtgaacagctcagctgaaaaactcttaacctaccctgagttacaatctgcctccctataatttccacccactgattctccattctgcccttagagggcagagtgctgacaggtccacgacttggtcccattttacaaatgaagaaactgaggctcagagagacaaagttttaaaacattcctgttaacagggccagaacccaggaagggatatgcttttctcaggaataatgtcaaaattaatatagcttcccagtcaatgaggactatataaattactatttgcaaagcactaagaacagtgtccggcacagagtcagtgctatgtaatgtagatgtgagaatgagagagcctgagattttatgtttgcgagtcccacaggaggcagggcaatgccaactccctgttgcttggaagcaatgggcaagtctatgaccctcctgttgaggccctgttacaggtaaccaagcccccacggaatggagctgaggagctcctgagaatgggcttgtccggttactgtttggattcagaactgacctaagagattcagaacagacagactcgccttggcctgagttgcctctgggctcttggaatgtccacagcaagtccattcctctccttgggcctcaatttacccacctgtaaaacaagaggattggaccacataagagatcggaagccaccagggtttctctttttctcttttatttgaattagttgacaaaacttaaatcttgggagattttacccagaaaatcatctccccagccccacctgagatctggtaatagcaggcgtacgttttgcatggcgctgaagaccaggtaaacgccccaccagctgcctcctgtgtgtgctacctataggcgcctgtttgctacccgtgaatgagatggtttctgtggatgttcccagctccgcagttaagtagagcacatccttccccttgcacctttttttttttttttttttttttttttttggagactgagtcttgctctgtctcccaggctggagtgcagtggcgcgatcttggctcactgcaagctctgcctcctgggttcacaccattctcctgcctgtctcccaagtagctgggattacaggcccccgccaccacggccggctagttttttttatttttagtagagacaaggtttctccatctcctgacctcgtgatccgcctgcctcggcctcccaaagtgctgggattacaggtgtgagccactgcgcccggcctccttgcaccttctgagtgtccctgtctcggagctggcaatgcagagatggatgtaggaaagccctgcccccgaggggcccagatgtggtggggatctgctgcacttcggtaggaaacttctttgagatctctatcctggacttgaaggatgggtagggtttctgccaggtagaggggagtgtagtctggtcttgccagaatcaaaactgttaaacagaagtcatccctcagtgatcatcaaggttgccttcctaaattagggagactttttttttttattgtccattctttcatgaaatctaggccacctttcctacagggctgaggtctgcttactggctggcagatccagccatttcccgagtatgagactgggagtcggtaggcttggatttctgtctggctctcactcaggaagactgagtgatttcgggcagattactgtccccctggacctcagtatttccttgcaaatgttaagatggccatgtaaatgttaacaagtaattctctcatttctctccagagggctgtgggtgggtttggaggggagaaatggcatctcctttggcctgggacctcctcccctcttttaccctccatgctgcctctcctcaagggcttctggagtccccaagtcaaatggcaaatggggaagagaagacagggtatggagtacaagaggcctagatcctctataggtctgatctggctggtgctgcccctagccagtaaagccaccctccagaccccttcaagcctgttgtagccttaaccaagatcaaccaacatggaggtgactgatcttggttaaggctgcgaccaacatggaggtaattgatcttggttaaggctacgacacgtttccctttagagaaaaatcatgttttccccctcaaaaaatcatgcgttaatttcctccaaccaaactaagtcccaggactactccgaaaactactcaatgaccatctgggcatttgtacatgggtttccatttcttggatgcctgctctcctgttacctcccagaagcctgtgaaaaaggcaaggcatattacttccacttaacggaagaggatgctggggcgaggtggcaggaaatgactggtccaagaccttacagtcaggaaatgtggaaacgggtgctgctctggggttctgaactcttggccctgcttaaccctggcttctcagatctctgatgctggtctcttctccccaggtacaatggcttggtgaccggcacgagggctaagggcatcattgccatctgctgggtgctgtcgtttgccatcggcctgactcccatgctaggttggaacaactgcggtcagccaaaggagggcaagaaccactcccagggctgcggggagggccaagtggcctgtctctttgaggatgtggtccccatgaactacatggtgtacttcaacttctttgcctgtgtgctggtgcccctgctgctcatgctgggtgtctatttgcggatcttcctggcggcgcgacgacagctgaagcagatggagagccagcctctgccgggggagcgggcacggtccacactgcagaaggaggtccatgctgccaagtcactggccatcattgtggggctctttgccctctgctggctgcccctacacatcatcaactgcttcactttcttctgccccgactgcagccacgcccctctctggctcatgtacctggccatcgtcctctcccacaccaattcggttgtgaatcccttcatctacgcctaccgtatccgcgagttccgccagaccttccgcaagatcattcgcagccacgtcctgaggcagcaagaacctttcaaggcagctggcaccagtgcccgggtcttggcagctcatggcagtgacggagagcaggtcagcctccgtctcaacggccacccgccaggagtgtgggccaacggcagtgctccccaccctgagcggaggcccaatggctatgccctggggctggtgagtggagggagtgcccaagagtcccaggggaacacgggcctcccagacgtggagctccttagccatgagctcaagggagtgtgcccagagccccctggcctagatgaccccctggcccaggatggagcaggagtgtcctgatgattcatggagtttgccccttcctaagggaaggagatctttatctttctggttggcttgaccagtcacgttgggagaagagagagagtgccaggagaccctgagggcagccggttcctactttggactgagagaagggagccccaggctggagcagcatgaggcccagcaagaagggcttgggttctgaggaagcagatgtttcatgctgtgaggccttgcaccaggtgggggccacagcaccagcagcatctttgctgggcagggcccagccctccactgcagaagcatctggaagcaccaccttgtctccacagagcagcttgggcacagcagactggcctggccctgagactggggagtggctccaacagcctcctgccacccacacaccactctccctagactctcctagggttcaggagctgctgggcccagaggtgacatttgacttttttccaggaaaaatgtaagtgtgaggaaaccctttttattttattacctttcactctctggctgctgggtctgccgtcggtcctgctgctaacctggcaccagagcctctgcccggggagcctcaggcagtcctctcctgctgtcacagctgccatccacttctcagtcccagggccatctcttggagtgacaaagctgggatcaaggacagggagttgtaacagagcagtgccagagcatgggcccaggtcccaggggagaggttggggctggcaggccactggcatgtgctgagtagcgcagagctacccagtgagaggccttgtctaactgcctttccttctaaagggaatgtttttttctgagataaaataaaaacgagccacatcgtgttttaagcttgtccaaatgagaa

SEQ ID NO: 2 - protein, 7 aa, Artificial Sequence
  Description of Artificial Sequence: Synthetic peptide
PKKKRKV

SEQ ID NO: 3 - DNA, 30238 bp, Homo sapiens
ccggcctcagggacgcaccggagccgcctttccgggcctcaggcggattctccggcgcggcccgccccgcccctcggactccccgggccgcccccggcccccattcgggccgggcctcgctgcggcggcgactgagccaggctgggccgcgtccctgagtcccagagtcggcgcggcgcggtgagtgctggcgtggcgcgggcggcgcggggtggggcggcctttgtctgctgcgggccgggcctggatcccgcggaggtccgcacgttcccgctcagggctgcaggagctgagcagggcgccttccctccgggctcctgctcccctgccctcccccaggtccgggcggcccccctcgcacaggagtcccgggaaccgcgggcgcccctcctgccctgggctgtggggcccgcggagagctgggggctcccggatcctaccccgcccccctttcctcgggttgagaggggcccgggcgccgtcggacctgcagaccccggaagctgcggaccgggccgggtgggtgaatgcgcttttgcaggccccgggtctggagcgggcatgggggcagatctgtcccgtgttgaagcttaacgaagccaccggccggcgctgggaggttagcggggtctcgggtcctgcagaggaaaacgcccagctccgggaggggagcggcggggagggaaggcgagtggttaggcgtgtccactctgcagggcccagcagggcgaaggtgtgggcgactggtgcacttccacaggcagccgtgggcagcatgaggggtcagattccgggaaggacaggtagagacggctggcaggggccacggggtgaataggtgttgggggtggggagggaattgggatgggcagtttgggcttgggaagcctcagggaggtggggggtgaggtgggatggagaggagatgcgggcgacggtggagggaggtggggaccccgagtgggggcacactagaagggaggggattgaattccagcgcccagggccctccctgcgaccgtttagctagcgaattggcaggtttggcagcctaaggcaggggatttatttctaagccaaacctgctctaatgagaaaagcgtgatagatgactcagatatgggatctatcactgagggaaaacattaagcaaatagtaaagcaaaaaagatttgtgtgtgtgtgtgtgtgtgtgtgtgtgtgtgtgtgtgtgtggcgggtgggggggtgttagttgtcttaatttagaaaaacgatttaccttcaaattggatgtggataattgtaaatgagtctgatctcttcattaaagcccggggtccttttcttataagcatgtcttcagcagttagtttctatattagaaagtaatgaagctgctttgtctttaagagagttctttatttagtgcggcctcctctagttccctctggcctcccagaagtccctaggaaatctgatgctgtgcagccttccttgtagtgtgggggactgcaaataggtgggacagtttgaggctgaggggaactgaagtctaaacttgaagtctaaacctgtccgatgggttgagctgatctgagtgcagggcaggatggagggctatggggctgtagggtatgaagtggctcatttcaagggagtattttgggtgagtacattttcctgatatctggagttcttgagattaagcactaacacttagggtaactgttgaccgtggaaatttacatacgtcaccgtcagcttactggagtatcctgatgtgaatgaaattttccttcatgactttgggtcagccctgtggacctcagtttttgttctgaggggttgtatggcaaggggacgctggcgggagagagcttcgttcctgcattaagtggcctcagtgatgcagtcagggtcccatgactgacctttggagttcttccatgtccttatggcattactggtggtttctcctgcctgcagtaagctttccagcttactctagactcctgtgctgtgagacatgagcttgtcagaggtaaggagcctgtgttaatgcaagtctcaggtgagaaggggtgttggaatctgaggaccctgttttccttcctgtcccctcttcagctctgtccaggcaccacccgatggagggttggctgaatgtctcatgttcatatacctgacagctggcttcggtgctttaatatttatggaaaggacagttatagaagtgtggtcccttcaaagtagtcctctggggtgtctgtgtccttattaggttgacttctgaaacttcctgtgagaattccatcattaaactttggctttctctggaggggtaaatctttgttctttggagtaggatttgagtttgacaaggagctggacaatgctgtttggagtcagagatgcagtgtgataagagagctgtgagttggaattccacagcacctaaagagactcctagaaaatgttgtagaacaagtggctggatggtacttggttgcacatacggggtttggggtctgtgcagaaaaatgaccaaatccaagcagcctctgagattatgaccacatgggggctgttaagctgtggatctgagtcatagggtcagggaaagaggaaaaatggcaaggaggatgacgttactgcccatgagcttatcctctgagtgggtggcgacttctcattgtccttttcccacatccccagggcaggagtgttagggaagtccaccagcaaaagggggagggcacacccagggcctaggggagggggagaggggtgaggactggtccacatgatttttgagaaattgcctttggtcttgttggctcagaatggaccccacacctggaagggggccacgtgtacagttatgcaacccttgcctgccacccccagttctaccgcccttgcagtgtgccagataggagcattgggttttcaggtttgggagtgggtagggttgtgctggaggctaaatagacattatctcatgtaatcctcatagtaatcctatgaggtagggtatcattaacaccattgtacagttggggaaactgaggcccagaaagggtaagtcacatgcccaaagacacacagccggcaaatggtggagctgggctgttgtctgcttccagaactggctttttctgctgctctggaggtaggcacaggttttacccctctttctggagcccggtaagatgtgccaagggtctccttagtaagtcagggaagactcatctggggaaccagagaaggggcaggcctgacctgggtgacccagtgactagtggccttcacagcatagtcagggcctttgctgagagttcttctcttccagagccctggactttatcatgctggggcttccaggagttccccctccaccctccagttctgaccagtgctcccagccagctgccccctttctccctttctttctctttgtggtccagagaatgaatgcctgctccacacaccttatgccattgggaatctgaccttctctaggcatagggagcttaatctgcgggaagtggagtgagaagcatttcttgctgggagccttggagcagggagagatactgtctctgggaggcaggggtcccaagttaccctagaggcaatgcaggctcctaggaactggggctgccttgtgggagacattggaatgtgtccctgtgggaatgctctgtgctaggggctatggcagcaggacggtaggagctcatggtacttggaactgtgaccaagcatctgcgaagaggaaggggcccaggaccactagaatgagtcagagccagagatggagtcgagttgtgcatttgctactttggagctggggcactgatagggctctaggtgaaaagtagggatacagaaggagtaatggtcccagaggcccagatgtgtggcctgacagaggaggtcttggccagggagagtggggtaggggcaaagtgttcgctcagtgcagaggccccatctaggaggccttgtccccatgcttgcggcaataataacagcaataataataattattactgcagttttggtactgggcactttcctaagtcctctctctctattgtcttattttattctcacagcagccctgtggggtagggattgttacccccattttagagatttggaattgggtctcaaataggttaagtcatttaaacttggtcatgtgttcagcaaggcatcggtgtcaggattgaaacccaaggctgctggcttctgagctcatgctgtaccctgggcaggcaaggcagcctggtgattccattcaataagtgaggaagagagataggagcatcagctggctcttagtcacttctgctggtggctgataattgagtgtgggcccttggccagccggccaccactctgggtccagatttccatctgtacaatgggcctggagctaggcgctggaccaggtgtaccgtaagaggccttctagctctgaggactggtggagattgctacactccgagaggggtctggtgcttagatggagaggggtcggcagagttgttctgctaagctgagcctctttcagggtagaaaccaaaggaatttggaggcaaggaggcatttaggcagatcacatctggagaaaatgcacccttccttgagtgcagtctggaaaggcttctggaaaggataggatttccagatatgtttaggtgggcacctagcaggactcagcagatattgagtgaatgcagatgtgtgtgccctgggcctgccagtgtctgacccgaaatctgcgctctgatgtggtctcatgtgctctcatccctttccttcctctccctattctccttgttgccatcccttcttttggctggacctcctctgggcccaatgtagctttcacttttttcagggctctgtgcctcctgtgtgtgtgtgtgtgtgtgtgtgtgtgtgtgtgtgtgtgtacacatttccacatgcatgtataggtcagttttgcagcccctgcacatgcctctagttccagggagaccttagccctgctttgctggccagccctgatgacatactactgtcctgactcacacagaaatcgcttggagaggaagaactgattcctgctcttgggtgggatcacgggactggggagtggtgcccagtggacagccttgaacataaaaggcccaaactgactcagattatcaggaaaaaggaaggcaaacagggaggctgttcccagggaactctagggaccctcccatctcttttctgaggctgctgcccatttatagagcacctagtattaactaggtcagttttgataattttgctcattgagtcctataatcatcctatgagggtaaggtttataatccccattttacaaatgagcaaactgaggctcagagaggatattttcataaagtttcattactaggaagtgacagagtctggatttgaacctgtctctccaactccaaagtcatcttcttaaacactagtgctaacttcttccatgaagcttcttgtgattacaccagcccaacatgcgatatggtcacagcatgggatggtggtcaggaccctttgatggttgaggagatgaagacccagaaaggcaaggggtttggcctagggagcctggcaagtgagtgacagagcctggtctaaagtccaggatatctctgttgttgctgttttccttttttcgttaattgcaaaagaatttacatgttcatagttaaaaacagagaagtgtatcaagtagaaaacagtagcaaactctcacccttattctgacactccagagttgcattcactctcaggcatccagatcctttccccatatacaaacatccatccatccatatatctatccatctctctatctaaacacacatgcattcattcgttcactcattgaatcgtgcattgagaacccattatgtgccaagccattgctagaattaaggatgcaatagttaaataaagcagatgtggttccttctcagggaggttctcatatatcatgaagaaaacagactgggtgcaatgaatgacagggtccttcttagagtggcagatctcttacctggcttttctgtcaaggtgaccctcagaatatggaggtgttaccttttatcttagtccatgttttactgctataacagaataccacagcctgggtaatatataaagaaaaaaaggttatttggcttgtagttctggagactgggaagtccaagggcatggtgctggcatctggcgagggccttcttgctgcattatcctattgtggaagggcatgtgagcgtgcagtacagacagtatgggggcagcacttacgcttttatcaggagcccacttttcctgtgataacagcattaatctcttcacttcttacaggccccacctcttaatactgttacagtggcaattaaatttcaacatgagtcttaaagcacccatgtcatctaggaagaagaaactgtatttgcagcaacactgtgaggtaggaaagggagtcctatgttgtaggaactggaagcagcccactgtggtgaggggcaagtaggaagaggtgaggctgggcaggtgggcagggccagggcagatggggctctgtaggctatggaggagctgcgatcttatcacaaggaaagtgaacagccctatgattaactattgaaggcagtgatataatttatgcttttatattaatagcaattattctggctgttgtatagagtatagattggagaacagaattgggtgggggaactagagaaggtgaacagactggtgaagaggcttttatagttatccaggcaagagatgatggtgacttggaagaccaggaagagaagcaggggtagagagaaatggagatagtgaagatatagcagacatatttgaggagtccttcagttacagataatagaaaactagctcaagcacatttaagaaaaaaaaaaaagacttgtttaagtacctaggcagtctatgtgtgcagcttgcttcaggaataggggcttaaatgatggttttagggctctatatccttctagcttccatctctgcctctgttcatttgtttggatcaattctttagattgttggtagcagacacatttattgctaacagtcccagaccgtatccttcttagtaatctcaacaagaaagagtcttttttgatggctgcagcagcaaggctctggggaagtctctgattgggtgtggcttggcttacagctcattctcgaactaatcactgagtgggggcagggcaggtttctccatgagccaggtcttgtaacatgcccaggccctaggctgggaggacagctccaccagtacagcatggactgggctccctgcaggagtgcggagccttgctaccagaaggggccagcatagaccaagagaagggcactgtagaataaaggacatggagcaaaataactgtgttaagactagctaccaaagacggagacgatctgctcggcattgaatttgcctctttgtcaaggaaagaaggagcagaagatgttaagaaggaattgaagtttaggccatacggggaggtgctcatctgttttaactgtatttgtcttctggcccctgggattgcctgtcctggtgtggggtgaacttggagacagaatctctgagaagctgtcagggatatttcaggccagtctagggtagaagagggttggacacgtgggtcacagtattccacagtttcctgctgtgcacagattcaatccgagtccccatctacgtccctcactacctcccttgcctcctctcctgagtctcagcctctcctggagtcccatcttcccagaatatgctgtggacatctcctcttctgtgacttttcatgctgtcccctccgccagatagccgagatgtctcctcctctgtgcagtccttactgagcctccccagcccccagtgaatggcttgaccctttcatccaggtttaagcctactgcctcgtccattcccacaataccttgtataaatgtgtaccaaaaaactggtcatattctattttaatgatatatttgtttcctaaaccttttttctatttttaatatgaaaatgtgggattttaaatatgccatttagcagctctgtaatcttgagcaagttattaaatctctccatccctgaatttactcctcggtgaaataggataataatagtacctacttcacagaattgttgggaagcttaaatgagttaatatgtgtaaaagcatttagaacagagcctggtgcatggctttcaacaaaactggcctatgttattattatttgataaaagcaaaataatatatataacatgggtaacttttgaagcataataataaacatacctcccaacttgagaatgagaacccctgtagttgaatatttatatgtacgattcttcatctccattcatattgcatgcatggccaatgcctggcatgtggatcatgaataagcatttgttgaatgaataaatgaacaaatgccagaagacttgagacagggaaataaccagttttatggggaagatggtagattatgggaacaacagatcgataatcttgttcttaatccttgacaaagtcctggaaccaatgagcacttgaagaagagcccactagtaggcacttgcatggcttcactggggttttgaaaatgcacttcttttcttgttcttctccagttgattggtccccagccagaagcagtgaagcttctcatgacagccctggggatgagatgggtagatgggagctgggtagcagcacaggtaggaacactcctaaccccggtgtactgaatggtggatggacattgatcatccagggacagatggtgctgtgggctttcctattcctgtcctctccctgaggaccttgatgacacccagacaccagcagagagaggagagtaaccttttcagatgatattcattcattctttttttaatccaccaacaaattattgagcattgtctatgcaccagaacagtcaaaagagtacttcaaaagatcacgacagggttacacagcattgtaaatatagttaatgctgccgacttatacacttaaacctggataaaatggccaacttcatgttatatatattttacaacaatgaaaaaaatgttgtggcagttggaggaatggactcagtttaactgggtgaaatggaatagtaacaaatgaaatatcctgtaaaactcctccccattctgaactccatcagaagaggatggcagaggtgtggattagcagcaatgagtgtgagtgacttctgatggttggctacagatttgatagtctgttattttgggttattttggtgaatggtgtgacatggctgctcaatggtgacttcgtcaaggaagatcaaatacttgcagggctttgataaggaagggggcagactcattctgtgtggtccaaggggtcacatgaggactgttgtgggctgtattgggagacaaatttgggctaagtataaggtagagcttctcaccgatgaacgctgtccaaaagcaagtggatagcccatgcaggccatgggtgcccatcacgggagggcaaacagagattgtgtgtatgcggtgggtggggggaggggcagggaaaggttccctgttctgatacttgatcattaatttctgcagtttccccagaatttgttctcatggcatcatctccctcagtgaccccacctttggttctgtcaccaccactgcacgaatgactgccatgtccctctgttctgagctgcagctcagtgtgtctgggagtccataggacattttggtgtggatgatccatagtcgagctcagtaggaactgatcttccccctccacgtgcttcatctccaggtctccttgttatgtgtgtccatgtttgcccattgctcaagccttcagtgccctcttgacaccttcagcccctccctcaatacaaacagtccccaagcctggtcacttctacccttgacatttgtccaaagctgggctcaggcatcactcggtgactctgatgagatagtctcctgttcgtattttgagatacctattttagatgtggtttccttttgtggctctgagcagtggcaatgctcatcgggtacggagacggggaagagaaggagggaaagtaagggtgggatggctccttagttagttcagatgctgtaagaaaggcccaaaatagcaatgacttatgctggaagagatgtttatttctcacccatgtgaccatctgggtatatccagggctgatactacagtccctcagggttcttctgtctgctgctctgccgtcctcagggtgttgcctttggcagtatgatcgccacacacaccacatctatgttccagccagtgggaagggggaggggaaagggaggggagggcatgcttctctctttcagggcatgacccagaagctgtacacatcagtgtacacattgcatggccacactcagctgcaagtaaggctgggatctgcagtcgttagctgagtggccgtgtgcctaactaaaaatgctatggaagaaggggagagctgggtgtgctggcagcacctgtagtccctgttactcgggaggctgaggcaggaggatcacttgagcccaggagttacaagggtgcagtgggttctgattgcaccactgaactatgatggtaccactccagcctgggtgacagagcgggaccctgtctcttaaaaagggagaaaatgggtgtaagtggacaacaactagcagtttctgccacagtcactttgtgcatttcagtgggaactgtgtggctgtgaactggttaagccttaaggatatagtccctgaaagcttcaagtactgataaagttccactagcatccacaaagcttttcttttataggtaggaacactgagctcagagaagttgcctagttaagattgcataacaaagtgtcagagctgggaccagaaccccacactttgggctcattttctagaattccagggtgatctggctgaggggcagacaggcagtgtcaggaggacgggtctctggagttcaggaaagggttacctttcccagcgcggctacctggggagctgctcatgacttttcagggatcatctctggggttatcatgcctctgaggtgcctccaattcgccctgaccatatcataaatagtatactataccaaactgcagtgatctaactgcatgtcccccttccctattagaatctgctccttgaggacagacgtgtaccttagttatctctctgcccctagtacgtccctaccaggaactccgtaagtagtgaaatgaattactaaagacatgaatgcatgtggattcaaggactccttcggttgcagacaatagaaacttagttcaaactggtttaagggaaaaaaaatgattggctcaaatatctgggcggtctaggtctgcagcttgcttcaggcatagctggatccagggacttgtctgacattttcagaactttgtgtctttctgaccctttttgtccctttgtgggaagtgttgcccaaggagcccctgcggggattgggaggaagtagggggttaggaggaagtggagtgatgtgggtgattatggtggggggcaaggagaccctcttgggcatccccaggcccagggcattttggccctgagcccaggtgcagtctggatttgttgtagctttctgagggcacatcttgggtcatctcttgggagcctccctgtggccctgcttctgcagggttggatgcccttgctgtaccttaggctgaggacagcctgacccctctctcctgctgctctgtgaaagccgaaggtgctctgtggttttgggatagagcaggaaggagaaggacgaggagtgggcactggcaggtgactcaccgggacgggtggcacatgctgactccagggcaggtcccggctggggatgagattcccctttgtggaaaacatgggtggagggggtggtacgcaggcagcatgaggcctgcgtggctccacgtggctctgggtcccgggccgaccagctctgtgttcacaggacactctcccattctccagggagcacttcctttctgagctctgtctctttctcctgtcctcagctcctccaggcccagctgtcagcgtaggggtctctgggtgccgtggactcttctggtctctttgcttctgggctgtcaaactgcttctctccagggcaggtttccaggatccagagtctaggaaaggaatgaaagggagcaagtccagggcgcagccctggaagtccctcatcttccctctggagggaagcgcagctcggccctgggagagcctgggtaggtctgatcaggggaggtgccctctgctccctgtacctgcccagagtggcaggaattagcctgatatatgaaggagacaattatatgaagagtcttgagtaccaggcagaggaatggggtctgacttctatagtgaatggggagccatgggaagttcttgagcaggggagggacatgagcagattcctgtcttaggtcctaagagaaggcaccttagagaatggggctggcagggaaagagaggagcaagcagggccagtgaggggggtgatgggtcagggtgggagatggaagcttgagaagcagtgtggagagtgagggaggcggcccaggaagaacccacaggccttggttctgtctggggttaaagagaggcagggagatgtggaatctgggcgttcgttcatccttagccctggtgcttcccgcaggggttgggcaggtcctgcaggcagctgcctgctggatcttcctgtgggcctcagggtggcccttgtggggcaggatgtggtgcctgccaaaggtgctttatgaatggagccggggaaggctgctgactcagcaggcagtaaggctttgaggccggaagcgtctggaaaggaagtggctgctcagggcttccccactgtagacagctgggagagaaggggggctggccaggatgcacatggtttggctgagggactcccttggcccagctgctgggggtgtgtgtgtgtaggagtggagggtggcggggggcgggtgtgcctggctgggattggaaggattgaggctgggcgcctggaatggaattgaggctagcagctgttgatgaggtttgctccgtggaagggtggaaaggtgtagcagaattggactctttttggctgtgctgactggcaaattacttgacattaacaaagtcacttatctgggctttaatttttttttttttttttttgagacagagtcttgcagtatcgcccagactggagtacagtggcgcgatttccactcactacaacctccgcctcctgggttcaagcaattctcctgcctcagcctcctgagtagctggtattacaggcctgagccaccacgcccagctaatgtttatatttttagtagacacagggtttcaccatgttggtcaggctggtctcaaactcctgacctcgtgatccacccacctcggcctcccaaagtgctgggattacaggcatgagccaccacacccagccatgggctttaattttttaaagtcctgcaaaaataggaccaagtgttacagcctatctcccagggtattaggaggacgtgaaatcatttctattcttgttgatcagtgttggttggcatagatgtggcttgatcaggacatggcacaaatgtttaggcagcagctgtgggactcagggacaaggtgtgtgcagcctggagggtggctgggattgggagcagggctggatttagggatgtctgcccttctcatccccagctcaggcctgacctgcagccacagacttgcctcttactcagtcctgactccagccttgaggtcatccccaagtccttgcctcttccacttctgatctgtcttggtcactcaatacagatgtgttaagctagcaaatgttctctctctgcattcccacactcatacacctagtcgcctcctaaaactctgtcctagaagcttctttgcaaatactgctgatttcacacaagctatactgaacccttccattttctctgcctcagtgaatgctccaccctgtcactgaggctcaaaaccacggccaacctgactgctctttctctctacccaagtcctcagatactgtcacttttacccagacatgctttgtctcctgtctggcccttcatttattccaccactataccttcctacagggatggctatattagcctctttttttatttttattttttgagatcgagtctggctctgtcacccagtctggagtgcagtggtgcaatcttggcttactgcaacctctgcctcctgggttctagcaattctcctgcctcaccctcccaagtagctgggattacaggtgcccaccaccatgcccagctaattatttgtatttttagtagagatggggtttcaccatgttgttcaaaccggtcacaaactcctgacttcaagtgattcgcctgcctcagcctcccaaagtgctgggattacaggcatgagccactgcactcagcctgaaatagcctcttaactggcctctcccttgccctgatacaatccagtctatgctgaggagctagagtgggttttaaacattgttacctagattatgtgtgattaaaatgctccccagtgattcccattactcatagaaaaacccaaattcctcactggtctctcaaagccctgcttgatctggctgaaacataccctcccatcagatagcgggtggaggtgctgtcagattaatcttcatgaagctcagctctgaccgtgtatttcccttattcaggaagcttcagtggctctcaactgcctttaggatacatttcacacctgtcagcccatctctaagtctggcccccacaggagctcctgctctgccctaccagctactgtctgccaaattgatctgcacacatcctagccccagagcaagccaaccttgccttcacttgccgccttgcctcctcttccttatatttggatactaacatcttagctgaaagggtggatcccagctgccccctaccccatcttccctgtcaggcctccccagggactccctgccaagcatctgtcaccaagattcctcagcagggggcccggtgggatatgggaatgaggacctcccagtgggcagttgcagccttccccactctggtccaggagagatgaggcaagagatggtctggggagaacctttggagacaaaggccttgcgtcctctttctcccaggcaggggcagccttccaccacggggagcccagctgtcagccgcctcacaggaagatgctgcgtcggcggggcagccctggcatgggtgtgcatgtgggtgcagccctgggagcactgtggttctgcctcacaggtgagggtagcagcatggggacgggaggggagggacagtgattgtggcagttggggagggggtgcccacgcctgttaggggtcctgccaagccagctctggctagcagggccataccttacttccacctgtgggatccagtaggcaactcacgttactgttcttagcctccatttccttgtctgtaaaatgggaacatgagtgctaaatgagatcgtgctatttcttgaatacactgtgtgcgccccctcccaggacctttccacttgctctttcctctgcctggaactttctgcccctaaacgtctgcatgactggatcccatattttgtggaggtctttgctcaatgtcacctcctctcaaggctctcctagctcccttgtataaaatagcacacctccgctcctccctccctatccctggcctccctgcgttattctgcctagattcgcccccacctggcgtttgcttgcttcctccctgttcaaagagcagggtccatctcagggccagagcggctgttgcatagtaggtgcccaataactgtgtagaataaacgatgtgactctccccacacggtgcttggcacacaggaagcactcaataataatagctactttaataacaatatcctcatcacatttcaaattctcatcagcatctctgctctgagacggcttcctccgtggggaagacaaagctgagggtctggcgccatcttgtggccataaagaagtgcctgtctctacccacggctgctctgatttctctagagcaagaaagggttttgtctgggtgacttaccaggtttcattcccccaaatgtcccctccaaggggcaccctggttcgactgacagggcatgagaactggcctggggcaccaggggtttcagcaagagatccaaggctagcttaagaactttagagatctctaggtactgcaaagattatgatactgagtatgattcacaataaaaataataaccataaagtcaatgttatttttctaaatgcaggaaacctttaatgagtgctgtattcaattagcattgtttcaaggttgatcttcccacattttgagtgtgcctgctttgctagtgctcgaagcacacaatctaaccattaccggagaatggtagtgccagggtgggggggttcgcttcccctcctcccctcctcctcctcctctttttttttttttgagatggggtcttgctctgttgccaaggatggagtgcagtggcgcgatctcggctcactgcaacctccacctcccaggttcaagcaattctcctgcctcagcctcctgagtagctgggattacaggtgtgttccaccacccctggctattttttagtagaggtggggtttcaccatatctgctaggctggtctcgaacgcctgacctcaggtgatccacctgcctcggcctcccatgccgggccttttcccctcacttctgactcatcagcaagtcctgttgattccctcctaaataaaccttgaatctgatccctctcttcttctctactaccaccctttgaagccacaccaccctcacctcttacagggacagctgaaaccgcccctaactggcctcccccttgccctgccacagtccagtctccacagaggagctagagtgagttttaagcattgctactcagattatgcgtgattaaaacactccccagtgattcccattactcatagaaaaagttagattcctcactggtctcttcaagtcatctttggtctgggtgggacatgccctcccatcagatgtgtctgccacactggacgctccccgatattttcacacagcaaggccagtcttgcctcagggccttccacctgctgtttcctctacggggttctctgtatgtcagctctttttcattccctataaatttcagcttaattgctttaaagagcatgtgcctcaccaccatatttaaaggtacgggtattctttcttgtataaaaacaaatcgtgtttcgttaggaaaagaaaaaaaaagaaaaaaagaaaaagcacttgtgattctctctcctccagagaaaccactattgacatttttggtggatacttttttggactccccaatttataacattacttacgctcatggggaaatgcacatggtgcaggcaggtgtaaagtacctgccagatttttgaaaagctgttgctttacttactaacctgctggctccttttcctcacataccttagtcacatgctgacgagaatctgtgtgcccatttgtctctctctcccattaaaatgtaagttctgtggggatgtgaccgtagtattgctctctgttgcatttctgacttttatgcttggcacctgtaggtgctgactatattcttgactgaatgaggtcctaagacaataaattactttgggtctcaggcctaaaaggaggggtggacagggcctggggttagcaggggcagggagcgggactagggaggcccacccctcctcagtcccccttatatgttctccactccccctacccccaggagccctggaggtccaggtccctgaagacccagtggtggcactggtgggcaccgatgccaccctgtgctgctccttctcccctgagcctggcttcagcctggcacagctcaacctcatctggcagctgacagataccaaacagctggtgcacagctttgctgagggccaggaccagggcagcgcctatgccaaccgcacggccctcttcccggacctgctggcacagggcaacgcatccctgaggctgcagcgcgtgcgtgtggcggacgagggcagcttcacctgcttcgtgagcatccgggatttcggcagcgctgccgtcagcctgcaggtggccggtgagcaccaggagggggacgccttccccttagttcaccctccattccccctgcagcccaccccctgctgcaccactgctcccagaaccccagtgctgattcctgtactcagccccatgcatccttttcgtcctctgccattgccctgcccttgacccctgccctctgtcacctccagctccctactcgaagcccagcatgaccctggagcccaacaaggacctgcggccaggggacacggtgaccatcacgtgctccagctaccagggctaccctgaggctgaggtgttctggcaggatgggcagggtgtgcccctgactggcaacgtgaccacgtcgcagatggccaacgagcagggcttgtttgatgtgcacagcatcctgcgggtggtgctgggtgcaaatggcacctacagctgcctggtgcgcaaccccgtgctgcagcaggatgcgcacagctctgtcaccatcacaccccagagaagccccacaggttgctttgcttaaatgtccccttgggggaggggggttctgcttctgtcggcaggggttgggagctccgaatctggccccaccttcaatctcccagaacagcaagttgcctcctaatgatagggagaaagataacggggaggtggggatgttcactggaggggttgggggcggagaaatcacaggccttcttaaggctctcctgacttcaaggctctggaagcctctgggaagaatggagccacatctgggtcagcagaggggtgggcgaaggaaaggagtcctgatggcaggattcaccagggctggagctggtgagagtcacctgccccaggcctggccctgggattggtctggtcaggccaagacccacctgctgtgattgttctcagaagattggggagactccatatctgagagtcctcagacttaatctgcttttgcatctaagaagaaaataggaagatggaacagggtctgggaattgatgggggaagagtttgggggactcgggtggtagcctagagagtcccatttctcctcaccaccctgcccctctgaccccgcccccaggagccgtggaggtccaggtccctgaggacccggtggtggccctagtgggcaccgatgccaccctgcgctgctccttctcccccgagcctggcttcagcctggcacagctcaacctcatctggcagctgacagacaccaaacagctggtgcacagtttcaccgaaggccgggaccagggcagcgcctatgccaaccgcacggccctcttcccggacctgctggcacaaggcaatgcatccctgaggctgcagcgcgtgcgtgtggcggacgagggcagcttcacctgcttcgtgagcatccgggatttcggcagcgctgccgtcagcctgcaggtggccggtgagcaccaggagggcgacgccttccccttggttcaccctccattccctctgcagcccaccctctgctgcaccactgctcccagaaccccagtgctgattcctgtactcagccccatgcatccttttcctcccctgccattgccctgcccttgacccctgccctctgtcacctccagctccctactcgaagcccagcatgaccctggagcccaacaaggacctgcggccaggggacacggtgaccatcacgtgctccagctaccggggctaccctgaggctgaggtgttctggcaggatgggcagggtgtgcccctgactggcaacgtgaccacgtcgcagatggccaacgagcagggcttgtttgatgtgcacagcgtcctgcgggtggtgctgggtgcgaatggcacctacagctgcctggtgcgcaaccccgtgctgcagcaggatgcgcacggctctgtcaccatcacaggtaagggcagatgaacagctggggaaggacggagcgagtaactccctctttactggaccctaacgtggaatttccataggtttgggtggccagaagactttcaaaatccctttcatagacttcaggtgctcacactcttccccacaagtccttaagggactcgagctgataagaaccatttataatgtttgccttcctaagagtgcttttcgtggcacttatgcttcttatgcagaggacaaggtacctgcccgaaatttggaggcatgggcaggaattctggggcagccacaaggtgtggcccaggggacttggtgtgggtgtgctttccagcaggaactcctctgagtggtaggaaggtattctgggtcagtgggcgccatctgattctgaagcctgagtgacagctggccctccctagttagtccccaacacctgagtcaacgtcagctcttcttcctgcagacttgcgctccacccaggcagccgttggatgggcaggggctgtctctgctgcccccgtgtggtcaaacaccagatagaggccacccctttagtgattgttagtctctggtttccaggttctagcctcgtgggcacctcttgtgcctgagggtgtgaagagggttgaggtcaagagccgcagtctccatctgtgtttggccctgagaggcctctggtcagtcacttcctgggccgacgtgctcagtctggctcttcagtatctctccctggccaactgagctttcccagggacctcgccctggtgcacagtgaggtcaggacagcaggttttgtctgtctggttctcctcttgtcttctgatgacttccatctgcccctcagcccatccaagttctgatctcaccccaagtttccaggtctgcatgcacctcaggactcacttattcctgtcctctccctcttgagacctatgtggtccccacttctgacaagctcggagccagggcccgtcacatcgtctgcttggagttcaggctcactcctccttctctcttacgtgtttccttctggcaaggttgtgctccttctgcccaccccttccccaagatggaaaacactcccttcctgtgctctccaggagagagtagctgccctgagctcttgaatgttctgagacatgtccttgaccttttagagaacagcatatggtttggtggtgaaaatgctgttcacaggcgaaaagaagaaatagaagatagagtgatcttggcagaggatatgaagctttcagaggagggagggtggtagtgaggacacctccaggggcaaatgggagctgagaaggccttgaaggataaggggtctttgtggtcatttgcaccctgggctgagctggatatttgcgatgctgtgcagaaaggacttatgagtataaatgtgattgcaaagagaatgtttatctcacctaagagaaaattctctattttaaacttgagtagctaacatttaaagtgatttcaaaaaaatttagggctgggcatggtggctcacacctgtaatcccagcactttgggaggccaaggcgggtggatcacttgaggtcaggagttcgagaccagcctgatcagcatggtgaaaccctgtctctactgaaaacacaaaaattagctgggcgtggtggcatgcacctgtggtcccagctacttgggaggctggggcaagagaattgcttgaacctgggaggcggaggttgcagtgagccgagacagtgtcactgcactccagcctgggtgacagagcaagacactgtctcaaaaaataaataaaataaaaataaagtgatttcattgaggccattgttgccaagcacatttcacagacgaagaaactgaggtccacagagaagggggaactttcccaaggtcacagactggcacagcggctctcaatctttgggggtcagacccttctttgaaaattggataaatgatcaatgcagcagtttgcacataactctggagggttcgctgcctctctaaactcctccgtgggtctgtagacctgggctccagtgccctgcagtgaggagatgagccatgatcagaatccaactttggcctctcagcctaatttcctctccttcccaccagccagcctcctgtttctgttagagcaggtctggcctactttggagcccttggcctgtattttgcttcgggcagctttgtatcatgtcaaacattctgggattcagactttcagtcctccagctggtctctcccgtacctgatgaagttagtgaagttgtgtgctgtgcagagcctcttggagggggatttatggagcaagccctagagacgtggcctgagcctgtcctttcttgggtgaacagggcaaatgtaatttgtgttccagggacaccaccagttaagggggaacatagagaccctctgcttgagtatttccatggctctgccccctcctctgctgtcagagccccatgatgggatttccagggtggttattgttttttaatgtgtgctctgtggatgggccctcttggccacatcagctgctgccctccttttctgcacacctctcttcatcactggggtgatggatccctgtgcttccaatggccagagcagcagttttgccagcagtgcctattgaaggtgacatctgcagatccatgcacgaggtgcatctatgctggggtctctgccgccaaagggtccatagcaccgcgcactgcactgacagggcctcctgcagaagctgctgaggccctgggtgtgcatcgtctccagacagcaaaggaaagcagcactgtcttttgtcaggcttttcctctcaagacttctccctaggacccagctgggtgcaggggctgggctagaggatggtatgtaagatggagtcacacaggctgtgctcagaacagctcctggccctacccagctttgggtcctcaacttcatccctcttgacgtgacagctctaagaggaggggcctcagtgtttcatgttaatatccccctggcaaggcccctgcagacctacctgactccttggggaaactccaagccctcactccagccccgtcagtgacctcatctgtatgtaggactcagcgaacattttctgtaaatggccagggagtaaatgtttttaggcatcgtgggccacacaccatctctgttgctgctgcttctccttctgttcctcctccgccttcccccatctttttttggtaaccctttacaaatgtaaaaaccatcactagtttgtggactgtacaaaaacaggccacaagccagctttggcccatgggctgtagtttgctgccttctgatccatagaatgggagatgtcaccaggtagggctgaagcagtcaaaagagggcctctggaggaggtgaatattgagctaagcagagaatttgggaaactgatagcattagtgcagaggctggaaggagccagttgcttctggagagaatggttaggacaccagtttggctgaagctgaggctcctacagtagaattagaaaacttaggggagggtaagcagcagccaacttctagaggtccttgaatcacgcttgaagcttgaagcattattctaaagtcactagggagccatagaaggtacttgagcatcaattcaaccacaggctcttcagcccttcctggttgaggcgtgtccacatcagccagggttgtatcagggtttggggagtgtatggcgaagggactgtaggaacttaagtgagctttattcatagtgttagggcccagtgagggtgggagcccctgttcacacttggagccaatggtgctgtcctccgggacatggggccaggcatgacagtctcactgttgctacttttcctctcagggcagcctatgacattccccccagaggccctgtgggtgaccgtggggctgtctgtctgtctcattgcactgctggtggccctggctttcgtgtgctggagaaagatcaaacagagctgtgaggaggagaatgcaggtgagtgtgtgtgtatgtgtgtgcgtgcgcatgcacacttatgtgtcttggggtatgttgctgtctttgatgtcaatagagtgtcactttctagtgacagaacgagtgtgtgtgtgcagatggggctggatttgtctgtgtgtgaccttgagtctacgtcttgtgtgtgtgaacaagcgtgagcctgtctgtccatgtgcagataccacaggatgaatgtggatgagtgtgactggaaggtggtgggagtgtaaggccaagtgctacaaagggatgagtgtgtgccaacaagtgtgcctgtgaaagtgtaagtcagtcacgtgtgtgtgagagagcaggccagagcatggaagctgtgcggcacaaatgtaggcatgccaggggcgtgcatggcactgggggtgatcgtgcctgccttggagtgagtttgaagcagctgccatttgcggggctgagggtcagcccgagctggcattggtgactggtaagtgggtgagaggacattggtgggtggtgagttgaccctggtgggtaaacagatgcatgagagtagatgggtagtcagaggctggggatggctggaggttgggaaggagagggaagaagagtggtcagttggcagataggtgagtacttgtgaggtagacaggtggaaggatgagcaggtagacggctggttggttacatctgttggaggttgatggttggcagggctactgagcgagcggatgggtgaggtgatgggtgggtgggctggtggagggtaggtggatggtctttggctgggtgtgtggcgggggctccaggttgagtggatggtctttggctgggtgagtggtgggctccaggctgggtggatggtccttgactgggtaagtggtgcactccaggctgggtggatggtctttggctgggtgagtggtgggggcgccaggctgggtagtttttggctgggtgagtggtgggctccaggctgggagccccttcatgttgtcacaggctcggctctgctgtgctctgctctcgggctctaacccgtgtctagcatttggtccgcaggtcaggcccactcaggccctgttcaccagcttcctgcactctcaggtgggaaagtgctggcatgaaaatgggcttgcaaaagatttttgtttattctgagttcttgcctttgcaggagctgaggaccaggatggggagggagaaggctccaagacaggtgagtctgaacttggagctggccctcttggctgggagagggacatatgggaaaggagagaggactctaggatctggaggggccagatttgctgtaaggtttgaatgaaatgtgttctgtggactcagacctccccaccccggtgagtctgctctttgcccagagttaggcaggaagtggatcacccagttccctcccaggtgtggcttcatttctcctgccaacctttacccatctgccagggccgattccacctgattggccccacaccgtggagtctggtggcttcctaggggtgggagcaggggctccggagatagggagtctgggtttaagttcctgctccatctcaggtaaacagagtggccttgagcaagatgctttgcctctctggcttcggtttcctcttatgtaaaatgaggataatcacagattcataggttgtttgaattattaattgagataatgtatataaaggacctagtatcatatctagtgccaagtgcttaatactctggagtcctattactattaggcaaacagcttaagacaatactgttctagttacagactgtgtagctttgggcaaggtgccttgctcctctgggcatcagtttcccatctgtaaaatgtcatcctgaccctgccctgatggcaccagagggctgttttgaagctctttcaggtgactggagagggaggtacttgcaaaggacataggagcatggcacagtaagctgggggcccagcttgggtgggtgccaaggcactggtgcccatggccgactcccaggggatcctgggctgggagaggcaggtttccgctgagccatttgggatggttccagttaatgccagttccctccccacccccgcagaaggaagggcaggagattgacacttggggactgctataaattatgccaattaattctttgcctgttggtgcccagcgtggcaggcgtagagacagctctgggatcagacctcattcttcatgctcagaggcagatgtagttggcagaagggagggagtgaggagaagagtgtgggtgatggagttggtcagtctcattccacatggtcccaggcccacctgcaaatctgccagcctcctttagcttctcacatcaccctgtgtgtacattgggctcagggcacttccgcatctccagctggaggtggagggctcgagggttgtcccattctatagatgcagaaaactaaggcccagagaggagaatgacaagccacagagtggaactgggacctgggactggggcttgggacagcaacctagggccccttcccttgtgctatgaagtggtcccactctgctgacttgtcccgccccttccagccctcactcctccctctgcctgactccctaccccaccacttcccatggttcctccctcaccgtgtgcgccttcctttttttacagccctgcagcctctgaaacactctgacagcaaagaaggtaaagacacctgggcttgaggttgtgtctgtgtatgcacacatctgtgtgtgagaggctgagagggtgggtaggcatcatcctttcactagtgacctgaggccccctctgcagaagagcagcctcaacttccccctggtgagatggcagagggctgagtaaccaaggtcccagctgctctgatgggacccaaatacgacagaggcttaagcaggacaggagtttattcctccttcctgtgatagtgtgagcataggtaatcgtaaaaccactgatgacctggagccaggttccacttacctggattctgccctcttcaacttcaagctttcactcctaggtctaagaggctgtttgtgctcccacgccccctccagagccaagagggagagaaaggaaggatatgtttccttctagagcttgagtggaagtagcctgcatcacttccgcttacattccattggtcagaacccaggcatatgagccctaactcaggggaggctagaaaagtgttcagctgggtagccatgtccctggcgcacagtgggtggttagtaaatgtccatagtcattattgggcctattgttataatgtcagtgatgacatttggaaatacaggagataggtcatttccttcctgtttttcagaatcaaataaccatagaagagctgggcagatggagataaaaagtgtcagcttaggccaggcatggtacttcacacctgtaatctcagcactttgggaggccgaggtgggtggatcacttgaggtcaggagtttgagaccagcctggccaacatggtgaaaccctgtctctactaaaaatacaaaacttagccgggcgtggtggtgcatgcctgtaatcccagctacttgggaagctgaggcgggagaatcacttgaacctgggaggcagaggttgcagtgaactgagattgcacctgtgcactccagcctgggcaacagagcaagattccatctcaaaaaaaaaaaaaaaaaaaagtcagcttggttttgaagagttgctggagaatgtggcctggatgggcaaaccagtttgcttcctaaccctgctccttggtgaggcagcctgccccctcagtctctggccatgctggacaaccacagaggcagtgcccagatgggggagctcttctcctctccccagggacatacagagccccaagaatgggtgagggagagggcaggggaagggcccaagcccttcttcccaagtctccattcagcttcagatgcagagtggggtctgaaagatgagtctttgggatggccctccacatggagacaggaagcccaagggaaggaggagggcccctgccgtgtcactctcagggaaaccagtgtggaggggacactgggaaggctgcctgctggacgagggagttgggccaggccttggagggtggatgggatggacaaacaggagatgagaagggaaaagtgttgcacgtagagggagagtggagggaagtgtatcgggctgtgggcctgtgggtactgagagggggctgcgtgaggtggtccccctcaggtgccccggcgtgcctggcacctgcatctgtgtctgggcctccagggccgtggtcagcacgggggctgtccgttgggctgctgtctcacacacactccccacttgaagtctgaccaggtgcttgggcttctggcataatcccaaaaatagatcttctggcatctaatgcttttcccttcccttttttttcttcccatcatgaaatgaagatgatggacaagaaatagcctgaccatgaggaccagggagctgctacccctccctacagctcctaccctctggctgcaatggggctgcactgtgagccctgcccccaacagatgcatcctgctctgacaggtgggctccttctccaaaggatgcgatacacagaccactgtgcagccttatttctccaatggacatgattcccaagtcatcctgctgccttttttcttatagacacaatgaacagaccacccacaaccttagttctctaagtcatcctgcctgctgccttatttcacagtacatacatttcttagggacacagtacactgaccacatcaccaccctcttcttccagtgctgcgtggaccatctggctgccttttttctccaaaagatgcaatattcagactgactgaccccctgccttatttcaccaaagacacgatgcatagtcaccccggccttgtttctccaatggccgtgatacactagtgatcatgttcagccctgcttccacctgcatagaatcttttcttctcagacagggacagtgcggcctcaacatctcctggagtctagaagctgtttcctttcccctccttcctcctcttgctctagccttaatactggccttttccctccctgccccaagtgaagacagggcactctgcgcccaccacatgcacagctgtgcatggagacctgcaggtgcacgtgctggaacacgtgtggttcccccctggcccagcctcctctgcagtgcccctctcccctgcccatcctccccacggaagcatgtgctggtcacactggttctccaggggtctgtgatggggcccctgggggtcagcttctgtccctctgccttctcacctctttgttcctttcttttcatgtatccattcagttgatgtttattgagcaactacagatgtcagcactgtgttaggtgctgggggccctgcgtgggaagataaagttcctccctcaaggactccccatccagctgggagacagacaactaactacactgcaccctgcggtttgcagggggctcctgcctggctccctgctccacacctcctctgtggctcaaggcttcctggatacctcacccccatcccacccataattcttacccagagcatggggttggggcggaaacctggagagagggacatagcccctcgccacggctagagaatctggtggtgtccaaaatgtctgtccaggtgtgggcaggtgggcaggcaccaaggccctctggacctttcatagcagcagaaaaggcagagcctggggcagggcagggccaggaatgctttggggacaccgaggggactgccccccacccccaccatggtgctattctggggctggggcagtcttttcctggcttgcctctggccagctcctggcctctggtagagtgagacttcagacgttctgatgccttccggatgtcatctctccctgccccaggaatggaagatgtgaggacttctaatttaaatgtgggactcggagggattttgtaaactgggggtatattttggggaaaataaatgtctttgtaaaaagctt

SEQ ID NO: 4 - DNA, 126782 bp, Homo sapiens
ttcctgcatcctaacatgctcactgtgggttatgtcctgagaagacctgcttggtttagcagctgtggtacccatgaaagaaatacatctctgatcctgtggtaagtgaaatcaaatttccctgcatttccgtaagaccccctataccaaaacattgttggggctcacaaactgatacctcaaaatatgctcattgacatacttaactgaagaagcctcaaggtctctctgatcttccccatctggcccccccagtctgtcccaaagacaggatgatgttgaagttcatttatctggccagacatggtctctcacgcctgtaattccagcagtttgggaggtcgaggtgggcggatcacttgaggccaggagctcaggaccagcctggccaacatggtgaaaccccatctctactaaaaagaaaaaaaaagaagtttcttcatctgtctgagatcctgaacagatcctttcacaagataacatacaagttcatctctgttccttgaaccgttcattctctccagcaattcccataacagaatttctcttctccatcaccccataacctattttgccaggatggtacataagtttctgaatcccgttggggtggggtaatcactctgcaattcattctgtgtgcatgttaataaatttgtatgccttttcttcaatcaatctgccttttgtgagttgatttttcaatgaaatttttttttttttttttttttgaggcagagtctctgtcacccaggctggagtgtagtggcataatctcggctcactgcaacttctgcctcccgggttcaagagattctcctgcctcagcctcaagagtagctggactacaggtgcctgccaccatgcccggctaatttttgtatttttagaagagatagggtttcactatgttggccaggctggtctcaaactcctcacatgaatattcacactgaatattcatggtgatctgccctcctcagcctcctacagtgctgggattacaggggtgagccaccgcccccggccctcagtgaaattttagagtggggaggggaagctttccttaggcccctatagcacaatggtcagtttagtataccttgttttcgattccttttgtctttgctaagaatttaagtaacacctgaagcaccagtcaggcagcattccaaagaaggttcagccgcatttaaaccgtcgtgtccccctgtgaggcactccaggccagatcccaatctcagccacattcttcacttacacttgactggctgagaaagaacagaacaaaactgccttgggtcagaggccacttttttatatcagatgatctaaactgttcctggaaggatgtttatctgctggaacaaacaccctggggcctcctggctgaagctgggctttcctctgtccatgcatcctccaaggctatccagagtgctttgagcagcccgccttgtccattctttccatttgtctctgtctccccagagagaaacgccacagggaagtacatgacaagctgctatgttaccttaacattgaattcccagcagggatcacaaagccatggaagatactggttcagaaattagctgagagggacagagggcttttagcagacgagtgctggctttgccttagagagctttctgggtggtgctctgactaagggcattcaggtctttatgattcagggttattataatggcggtgctaacttttcttgcgtactgatgtaactggcagcacattaagtgcttcacctatattactgcagtcttcccaagaatgctatgagattggaccattagtgctaggaggtagaagggctgggaggttcccttacccatggccataccaagggtctgagccaggattcacactggtctgcctggctttagcattcatccctcactgttactatgctgcagaggatgaattggcagcccatgggctggattttgtttagcctgccagtgttttaaaagacatttaaaaatctgagccaatatttaaaatgcaagtgatttcacatataaacaaacaaaattctaacatctcttaaaaatagctatgactggcaacactgggtcctcaatcccaaaggctcctggctattggaggtaagtattggcttccctgctacatggggcatgtgctcccagtttcccatagaacctagtatggcaggctggctccattcatgtacctgctccagaagagccagacttgcattatagccttctatagcatgatttttgggtgctgtgtgtacccctgacctggcatagccctagaaacagaattctgtgccaataccatagcttgggttggttaggaacagagaactcaagtgtaagctgctgagggtttgtggcaggtaatttatggttaattccaaagtcagttcatctccaagggagagggcaggataaagaggtggcatgggaagtgctggaagtgaccatagacctgggattgactccaggttctgccacaggctggttacatgagccacattgagtcactttctttccctgtacctataagaaggagagattggagttgatgttgtcaggtgggtgtcagctctgaaattctaatatgccactgcttgttagtcaaattttcacaagagaaactgactttggaggtgtatcttctggcagtggacaatgggtgcaaacgaataggtaattagcaaacaactccggctcaggttcagagcagctggaaggttatggacccggcccagtgaagagaggtgtggcccaaagcactgcagccattttgaatgccagagctttctgtcacattagttcaggggtcagttcagggcttggctctttatttagaaaccataataggaactacttaaaccattcttttccagagcaaatgcctcaccccaaaaaatatcactgggaactatattagagagaattgcacaatctttcagtgcattcagaggaactcacaggaactgtattgttttctactttcttccttgcttttgaaacacaaaccttatcacaacaaagtgaacctgtttctccaattaaagcagtcatgaaaataaatagttatccacaaaactgcactgtaagaaataaaaataagtcagtagatcaggcaaagtgccaagaaaactccttcgtaatacattttacttatctcctcttttgtgcctctgcaggtctcttaattccctctggcctgtcaccatctctgagtgtatgtttcattggcttctttgaataagccttattgtctctttagcaaaggtggtgtgtgcaaccttatgttctgttgcttgtctgaaaatgagacctcaggcatgacttcctggtatctcccaggaatgagcaggttttaggatgtggacccaatagaaactcttctgagagccagataccaattgaggttcttagagacctctatgagaaggccaacttgactgaactgagcctactggcttgactttgtagaaacttccttctatagcggaggctagctgactttccagcttgttctggggcagtgcctcctagatcaaggcttctccaactttaatgttagaatgtagattctcattcagaaagcctggggcatggtccaggagagggtctgcatttctcccagggcccctggtgatgctgatgctcctagtccaaggactgcattttgagttgcaaggtcctacactagtaattctcaagtgtctgctaccaggaccaacagcaacagcatcaactggtaacttgttagaaatggaaattcttaggctccaccccagatctcctgaatcagaacccctggatgtgatccagtaatctctattttttttttttttttttgagacagaccctcactcttgtcccccaggctggagtgcagtagtgtgatctgggctcactgcaacctctgtctcccgggttcaagcaattctcctgcctcagcctcctgagtagctgggcttacaggcacctgccacaatgcctggctaatttttgtagttttggtagagatggggtttcaccatgttggccaggctggtcttgaactcctgacctcaagtgatctgcccgccttggcctcccaaagtgctgggattacaggcgtgagccactgtgcctggctgtaatccgtgttttaacaaaccttccaggtgagcctgatacatgtgagagtttgagaaccactgtctgtgtcattgttatgggttgaattgtgtccctcctctaaaggatatatagagaactcaatatatgaaatcctaacctctagtacttatgaatgtaactttatttggatatagggtctttgcagatttaatcaaattaagatgaaatcattaggatgtacctagcctaatatgatcagcgtcctttaagatgatcatgtgacatcacagagacacagagggcaaagatgatctgatgacaacagaggcagaggtttgaagtgatgcatctacaagctaaggaatgccaaagatgaccagaaaaaaaaaaaaagaagctagaagaggcaaaaaaaagaatgtttttttctccgtgtttccgaggcaacatggccctgccaacatcttaattttgaaagtttagcctccagaagtgtgagacaataagtcgctgtcattttaaacaacatcatttgtggtacttcgttacagcagccttaggaaactaatacaatcgtgaaaggctttccctgctcagtgatagaacagcaggtacttatagggctcaggtgcggctattgactgatgggtagcagaagatagggaaagaaatggaagaaggcaaaatagaaagcaagaagcagtgatgatttttgttctgaggtatttgtgggcttaataatttttaaaacattatttgtaagttaattatcaaacatttattgaatgcttactacatgccaagatccgttttagattctggggatataacaatgatcaagtccagtttcttttcctcaagaaacttgcagtcagtacaggaaagagttgagtaaacacgccctcactatgcaagggcagatggcactcagagtacacaggctatgggagcagggaagccacacagagttgtattggttgcgcattgcaccacacatagtcttagatgtaaatggtctcccctagggttgtgtggtgcacaaatgctctactgagcatgacagctccgttaggaagattcaagaggaacattaaattcagttcttttgatttttattttatttatttatttatttatttttgagatggagtttcactctgtcgcccaggctggagtgcagtggtgcaatctcagctcactgcaacctccacctccaggtttcaagtgattctcctgccttagcctcccaagtagctgggattacaggcacccgccaccacacccagctaatttttgtatttttagtagagatggggtttcaccatgttggccaggatggtcttgatctcttcaccttatgatccgcccaccttggcctcccaaagtgctgggaatacaggcgtgagccactgcacccggccgtctttttattaatttattaaattttcaaggcagtcctctagggtccattcaatttattcttgaaggtcaagaaaagtttcccaagggaaatagtatctaaactgagacctgaagggtaagtagaagttaatcaggtaagggaagctgagggggctttgggtaattgaaaaggaaagtgtttagaaaaacaaaactgcacataccagactgagagacaatgggagcatctgtgaggtgtgtactccatcaagggctctgtaggcaaaaagctaactacctgatttgctagtcagattcttttcagggcctagagccccttaaataagctccattttgtagtaagactttctttggttgctcaaatatctccgaagtaattaaagcctgcagatcttagttgttaaactgcctgatgcaaatttcttataatagaataatttaggtgtctaatggaacagaatataatatgagtagaagacatgagatgtcaatgctatgtttaaaatgtgtatgtctaattggctaagtaactgtaacttttaactttctattttagccaggagtcttcctcttttccttcccaatgagggtcagttgtggggagaccatattaaagctggcttgttttttttgtttgtttttttgttttttttgagacagagtctcgctctgttgcccaggctggagtgcagtggcgtgatctcagctcactgcaacctccgcctcccggattcaagcaattcttctgcctcagcctcccgagtagctgggactacaggcgtgtgccaccatgcccggctaatttttgtatttttagtagagatggggtttcaccatattggccaggctggtctcgaactcctgacctcgcgatccgcctgccttggcctcccaaagtgctgggattacaagcgtgagctatggcgcctggccagctggcttatgtttttaacgtactgtaccttctcaaaaatccaaggctgtgtaaagtccactcatgtagagagaaggaacctgctcaagttttattcttggaactagaaaaatcagtcttccctttggtgttgagtgtgaatttctgactgggaagtccaagctgaggggcaggtggaggcctgggggagttggccatggcttggagaaggcagccacagctcagctgaggcagccatgagcacagggcaaattgggcagactactcctggcagcacaagctagagagcatgttgggtgcgtctgttagcggtggagaatccatatgggtctgcaacaacctcagttcttgcctcctcagaagaaagaatttggccaaggggtataaagcagaaaaaaagtcctggcaagttttagagcaggaatgaaagttcattaaaaagctttagagcaggaacgaaaaaaagtaaaacatacttggaaaaggaccaagcaggcaagttgagagatcaagtgcacagtttgacatttgacttggggtcttatatactggcatgcttctgagattgaatccctctttccctgattgttcccttggaatgggctgtctgcatgcgcagtgtgtttatgggagttgtacgcatgctcacttgaggcattcctcccttgcgagccgaaagtttctagaagatcacataccagttaaactctgccattttcctcttagtgtgcatgcttgagcccacttgctcaactcctgagatcttatcaggaagctgctgatcaccacttttaagtgttttctatctattaggagactgcctttccctggagccagctgtgcccaattgttattttagagagacagttaacaaaccaccggaccatcacctgatggttgcctgacattacaggtgtgggaaggggccccctcttgtcctgctcccatctgcctgactatctactggaacccttctccagcagcagctcataatatcattcaggtgagaccaggatgcactgaacactgggtctacaggctggggtggggctgatggtggagcttcaggggaggcccaaaagagcaacacacacacctggagagcaaagcagcagctcctagttgcaatcctcatattgggagttgagggataagctaagatctggctgtttatttacaagctgaaatggcctttgcaaaagtatgactgaggaaattatgacagtgaaagaaatcagacctaaccaactccatcttgcttctaactttaagctgtccttgttcattcctgggcatagaccaaactaactttgggaaggaattcagttcataatttgactctgaaacaaaattgataacagccctttcctgaaaagaccacccttcttgcctgggaaccagttcacctttgcaggactaacaaattagctataagatgagaaattacagtttaggggtcatgcagtctctggctccaagagtctgaaccgccccaaattttaaaacctaagatcagtgcttgagatgttttacagaccctgcacttgatggatcagctgacaccacccagaccagtaatctggctcaatcagttttgccatcccacccaggaacagaaaacagcaagaaaaactcaccttgaccccctttggttccatctccaacctgaccaatcagcactcctgacttcccaagcctccacctgccaaattatctttaaaaactctgatccctgtatgcttggggaaactgatctgagtaataataaaactccggtctcccacacagtcggctctgtgtgaataactctttctccattgcaattcccctgttttgataaattggctctgtgtaggccgtgggcaaggtgaacacactgggcagttacaaagcctcagattcctttaggaccaacgattgaaatttcttcctaaaatcaggaattccagaagtagaagcagtgcgaaggtcatcacatataagaatcaccctggcctcgaacatcacacacgggggcctgtcgtggggtggggggctgggggagggatagcattaggagaaatacttaatgtaaatgacgagttaatgggggcagcaaccaatatggcacatatatacctgtgtaacaaacctgcacattgtgcacatgtaccctagaacttaaagcataattttaaaaaaattaaaaaaaaaaaagaaccatcccagcctcatcttgccctccagttccctccagagctgtggtgccctgcagcccaccaacagctgggtatcatgagagcaagttgctctctgtctcctgaacacagctgtggctgaggaaactttccttttggattgagtgacaatgaatctttctgtagctttctttcgccagaattgttgtccctttctcggagacctccaccacaaccttgctaagtgaccttgggaagctcaccttttctttctgtgtccacattttctctgcctgtctaatgggatttctggcaggatcaaattaaattactatgtgaaagcactttgaacaagtagactgtacatgtggtggtcacggtggttattggtgtttggtattatgtttcggctctctctgaccatggtcttcctgtgctctgccagctgcagagctctataccctggactatgaagaagagatcttgtattccagggcccagctgtcccggtgtgagccactcattgttctgatctcctcaagagaggagtgaaaacaaattgaggaatttgaaacttttagaccacacccccaaacacagccctaataaataacatacattcagttttctgaaaagattaaatcttgtccacatactccatcaaaaactacaccccagtgcatccaagagctcttcaacaggggtgtttacaaacctgaaaccagccatcagagccactgaaacttcagctggtgcctgtatcggggagtaaaaagacctttattctctgtgtttaggcttagtgcctggggttctgcagatgaaacagagaaaacacaggttagcaagagaaaagggtttctttcatacacatatggaggaggctcacagaaatgaaaaaaaatccaaggggtgctcatacctagaggcttatataccattttaacaaaatggtatataaattcaaacaaaaataaatttgtaaagaagtgagaagataaaaagagtttgaagttgttacgagtagtaaattgtgggaaggtaaatacagggaggaaataaatggaataaaagagatattttagtaatatttggtatgttggttcctctcagactccagtgattaagagtctaatctctctgcccttcctgctatgagagaggaaaagggtaatgtcctcacaaagggaatttatgccctgcctttaggcaaatgggaggaggatagagaactttttttgtgtctgctgttttttagttgccttcagctcaaaataatccttatgccaaagtggcatatttgggggtggcctattctgagcaccttcacttgcataactgtagcaacagcatcttctgagccatttgtacctctgttatttccctctcattgtcctttggtcaaccatgctgagactgaaaattatccaagagttttgccggccgcagttaagaatccccatctctctaaccaaagggtcaagtcccatccctacctgtcaaaatcctacttgtgtgtaaagggattattttaaaggcaataagtagtttctgagtacagagtcattggtttggaagtataaccacaaattgactttcatcaatcaattgttattgagtgcctcctaaacaccagggcctattcaatgtgctagaaaacaaagataaatcaagcacaattcctgccttttggagagctttacctcttgggggtctgatatagtttggctgttttcccacccaaatctcatcttgaattgtagtttccataatccccacatgtcatgggagggaccagctagagacaactgaatcatagtagaggattcccccatcctgttcttgtgatagtaagttatcacaagatctgttggttttataaggggcttttctccattttgctcggcagttcttcttgctgccgccatgtgaagaaggacatgtttgcctccccttctgccatgattgtaagtttcctgaggtctccccagccatgctaaactgtgagtcagttaaacctctttcttttataaattacccagtctgaggtatatccttataccagtgtgagaatgggctagtacagtaaattggtaccaagggagtggggtgctgctataagaatacccaaaaatatggaagcaactttggaactgggcaacagacagaggctgaaacagttgagaaggctcataagaagacaggaaaatgtgggaaagtttggaacttcctagagacttcttgaatggctttgatctgaaagggatatggacaatgaagtctaggctgaggtggtctcagatggagatgaggaacttgttgggaattggagtaaaggtcacgcttgctatgctttagcaaagaaactggcagcatttttcttctgccctagagatctgtggaactttgaacttaagagagatgatttagggtatctggtggaaaaaatttctaagtggcaaagtgttcaagaggaagtggagcataaatgtttggaaaatttgcagcctgacaatgcaacagaaaagaaaatccccttttctggggagaaattcaagcccgctgcagaaatttgcataaggaacaaggagctgaaagttaatcactgagacaatggggaaaatgtctccagggcatgtcagagaccttcatagcagcccttcccatcacaggcctggaggcctaggagtgaaaaatggtttcctgggccaggcccagggcctctctgctctatgcagcttctggacgtagtgccctgagtcccagctgcttcagctccagccatgactaaaaggggccaacatacagctcaggcccattgcttcagagggtacaagccccaagcctttgtggtatacacatggcattgggcctgtgggtgcacgaagtaaagaactgaggtataggaccctctgcctagatttcagaggatggatggaaacacctggatgttcaggcagaagtttgctgcagggacagggtcactgtggagaacctctgctagggcagtgtggaaaggaaatgtgaggttggagcccccacatagagtccccactggggcaccgcctagtggagctgtgagaagagggccatcctctagaccccagaatggcagatccgctgacagcttgcaccatatgcctggaaaagctgcagaaactcaactccagtcgtgaaagcaagtgggagggggactgtacctggcaaagccacagaggtggacctgcccaaggctgcaggagcccacctcttgtatcagtgcatgctggatgtaagacatggagtcaaaggagatcattttggaactttaaggtttaatgactgccctattggatttaggacttgcatggggcctgtagcccctttgttttggacaattatcccctttggaatgggtgtatttactcaatgcctccattgtatctaaaaagtaactaacttgcttttgattttacaggttcaaaggcagaagggtctcattgtctcagatgagactttggacttggacttttgagttaatgctggaatgagtcaagcctttgggggactgttggaagggcatgattgtgttttgaattgtgaggacatgagatttgggaggggccagggtggaatgatatggtttggctgtgtcccctcccaaatttcatcttgaattgtggttcccataatccccatgtgtcgtgggagggacaaggtggagataattgaatcatgggggcaaggtttcccccatcctgttcttctgatagtaagctcttacaagatctgatggttttataaggggcctcccccttcacttggctctcattcttccccctcttgtcaccatgtaaagaaggatgtgtttgcttccctttctgccatgattgtaagtttcctgaggccttcctagtcgtattgaactatgagtcaattaaacctctttcctttataaattacccagtcttgggtatgtccttatagcagcatgagaatggactattagagggtctcagaatctaaattgtaagttctctgaagagctataagtgctgtgatagcctgaaatgtagtatacaatgtggatatagggaggaagaggtcagttctatctgagcaggatggggtgggatagggtaaagcagagaaattatcataaacaagtgatgttcaggctgagttttgaaagaatgggtactcagtgggtgtttaggggcctggggcaataaaatattgcaatgattcccttgtttctcaatggtttgcaccatttacccaaggctcagtcattagtcacatgtcaagatttctattcctatttgggataatctggtttcttcattccttggctcagcaagagaacctaaacttcaacttgacaaactttcaatggcagcagccaccttctcaattggaaattattttatttgtgtgcctatgacactttctgaattcccttcttataggatttacctagtattgtaattgcttatgtacctatactatctgtaatcagttgtaagtgtgatcagagctttgaaaggagaagcccagtgtgatgtttcaaggtaaagtagggaaactgacacagtggagatcccaagaaggtgccctcaatgggtacataatttttttttttttttagacggagtttcactctgtcacccaggctggagtgcagtggcacaatctcagctcactgcaacctccgccttccaggttcaagcaattctcttgcgtcagcctcccaagtagctgggattacgggtgcatgccaccatccccagctaatttttgtatttttagtagagatggggtttcaccttgttggtcaggctggtttcaaactcctgatctcatgatctgcccacctcggcctcccaaagtgctggcatgagccccagtgcctggctacataattctatgttgtttaaattaagctggaagacacttgtccccaactcctgcctggctagttttactctttggtgtgcaatgctctcatatttaccctctagctcaaaatcctataaaatgcctctctatataaattcactgtaccagagatcaaagccccaatagctatctatccttctcttttcatttgtctccttctctgtcttctgtaataaaacatcaatatttagctgggcaaatggttgctcaggtagcaactgtatttcccagcctttcttgtagctaagagggaaatatgacaaaattcctcctattggagtgtgagcagaagtgatgtgaagaacataagggccacattctttatagataaaagggcttgttgtgctccactatccatttcctattgtgtgggaaagagcagcaacagcagcagccaccttaggccacatgggtgccaccactgagggtgacagagctgccccagtgccagtaccttgggatgatcttagggagcagcattgcctgtctgctctggaattctagactctctatggacccttccaggagggaaaattaaacttctgtctcactgtactttggggtctctttgccagggcagttaaacttgtatcctaactcatatatccaggcgctgccttttggcatgtctttagtttagctgagggccataaaagcatttatccactttgtcataatctgtgtatagtttcagtgggagatttctcttgagtgattttccagtttaaattttctcatgatccccatctggctgtcatttcttttaactcatcctcccctaatgctcacttttattgtacagaagctctaaatattttgagaactgaagtcatggagtcatgggatttcttggctaggtcataatactttgggaaaagtggactaggagagaaaggggatgtgaatgagattctaatatgaagatgaaagtcttagttacccagagtcacagctctccattaatatgaatgttttcaccacacctagagaaagaaaaaaaccatgatcaaatcagctgttattagagatccattcaaaaaaacaatcttgtaggcctatgccagagtttcagcccaattggctacccttccatggtgacaaccacaactctctgtgatgaagtgagaatttgtcataatatcactgaggccatcttttcaagatcagagagtctctgctttgtcaaagcattttatttgaggggaaaaatggatggcaatgcttattaaagaatacatcataaagaaacactatacaaatgtgcaaaggtacacatataaggatatttattgtggtattgcttacattggcaaaaaagtgcaaacatcctaatagccagcagtatgaggaagattaataaagtatagtttgtcttattacataaagcaaagcagccacttcaaagaaggtatgtctgtatcgactgacttgcaaagctgcccacaatatattgttagcagaatgattctatctttgataaaattagacaatagatatttatgtatacattttcatatacctagaaaaatagtctggaaggatatgcatgaaattattaataatgattacctctggggagtagaattaggagagatggagtagactttcatattttactctgtataattctatattgtttgaattttttatgatggtgggaattcatgatgaggcagagatcatacttatcctgctcactgctctctcatgcagagaatagatgaggtgatcaataataatagtaacagttatgtagcacctaccatgtgctagtcaccttcctatggaccttacatatgttaatctatctaattttcatatatatactatgagataagtactattactatctccaatttaaagatgaggagacagagcatagagagaacaagcagtctgctcaacgtagcaaagtgatggagctgagattcaatccaggcagattggctccagtgactgatcttaaccactatcatttgtcgtgttgattaatcgattgaatgaatgaatactaaaaaattaattttccagctaagtcttttataagtagaagaatcaataagccaggaaagctcattccgagagtattctacttaatcagggttttacaatttatctttcattgcaaagtaatgggctatttatacttagagccttccaaatgctgaaaagacactgatgttaactgttgttgatgagtgaccaggagaagctgaacattttaatttaaagtaagtgaaagaattaattgccagcatattaaaagccttcatctgctgttcctctgccttccacctggaacaataacaagggcatcatgagcacaagcatgacagcctggcttttccttttcaagctgcctgattttccagcttgtgaaattgtcttctctgtgcttacatctggtaatttggaaatgtaggacagaattctgtagtctggaactatctctatgccttacgtgaccaatgggactcctccctcagggaaaatggctaaagaatagaccatgtccttggggcagaggaactagcttttatcttattagtattctcagcatctggcagagtacctggtgcatagtaggagctttatatagcctagaacaaggccatcttaactgtcaggtcaatagaaatttttatggtttagagaaaggcataagaaaaataaaggataggccaggtgcagtggctcacacctgtaatctcagcattttgggaggccaagcgggcagatcacttgaggtcaggagtttgagaccagcctggccaacatggtaaaaccgcgtctctactgaaaatacaaaaaaaattagctgggtgtggtggtgcacacctgtaatcccagctactcaggaggctgaggcaagagaaatgcttgaatgtgggaggtcaaggttgcagtgagccgagattgtgccactgtactccagcctgggcaacagagcgagactctgtctcaaaaaaaaaaagaaagagaagaaaaaagaaaaaggaaaagaaagcatactccttggctaaaatagttttctaagtataaaaatggcattcatttagcaaatgaatacttagcacctactatgtgtaaaatactgtgggagatacaagtgaatacaaaattgtcccagtctttagcttgtactagagcctgagagatatatgcgcatatgtcagccctgtgaatttagataggagaattttgtaaatttgcagtagctcccccaccaatctttttttttttttttttttttttgagatggagtcttgctctgttgctcaggttagagtgcagtggcacaatctcagctcactgcagcctctgcctcccgggttcaaatgattctcctcctgcttcagcctcccaagtatctgggactacaggcgaccaccaccatgcccagctaatttttgtatttttagcagagacggggtttcaccatgttggccaggctggtctcaaactcctgacctcaggtgatctgcctgcctcggcctcccaaagtgctaggattacaggcatgagccaccctgcctggcctctctcaatcttaaagtacaactcaggagtaattttttgggcatgtggaatttgtatacatggctaaaatgcatttttgtgttatagagggaacaaatagaatctcttcctgaggacaattgaatgtggtttcctggcagatgggggttggtttacccatgcacagttgagttgagagtaggtctgcagataaccactcctccatgagagagaaggcagaagaaaatcccatgggaaaaagacacatcagcctgtttgatggaacaaatgaagttttgaggggaggaggaaaggagagcagtacttaaatgaacaattgttggcctggcacggtggctcatgcctgtaatcccagcactttgggaggccgaggtaggtggatcacgaggtcaggagatcgagaccatcctagctatcacagtgaaaccccatctctactaaaaataaaaataaaaaaaattagccaggcgtggtggcaggcgcctgtagtcccagctactcgggaggctgaggcaggagaatggtgtgaacccgggagtcggagctcggagtgagccgagatcgcgccactgtgctccagcctgggcaacagagcgagactccgtctcaaaaaaaaaaaaaaaaagccaggcgcggtggctcacacttgtaatcccagcactttgggaggccaaggcgggcggatcacaaggtcaggagatcgagaccatcgtggccaacatggtgaaaccacatctctactcaaaatacaaaaattagctgggtgtggtggtgggcccctgtaatcccagctactcgggaggctgaggcagaagaatcacttgaacccgggaggcagaggttgcagtgagccaagattgcgccactgcactccagcctgggcgacagagcgagactccgtctcaaaacaaaaacaaaaacaaaaacaattgtgcaggctccctgatcattaatggtcttcataaaaagggcatagagcactaaataactgacacaaaattagggtggagttagaaaggtacttgtgggagaaaatttgtgacgctcacactgtgtctcactcaaagaggatctgcacaagcattaaagttctgagctcacacagaatgggaatgttgcaattctgtttgtttctgtttagaaataataatacctcagccaggagcagtggctcacgcttgtaatcccagcaccttgggaggctgaggtggacggattacctgagctcaggagtttgcaaccagcctgggcaacacggtgaaaccccatctctactaaaatacaaaaaataaaaaaaaataatttgccaggcatggcggcatgcgcctgtagtcccagctacttaggaggctgaggcaggagaactgcttgaactcaggaggaggaagttgcagtaagctgagatcgcaccactgcattccagcctgggcaacagagtgagcctccatctcaaaaaaaaaaaaaaaaaaaagaaaagaaaagaaaaaaagaaatagtaacacctcatcatacatttttcatgaatctttgagcctttgggaagacagcatagtttagtgatgagaaaagcaggtgccagattgccagggttcaaaacttatcagctgtgttactctgggaaaacaaacaaacaaaagaacaccttatgtgggcagtaatatattcaaagggctaatgttaagattaattgagacaatatatgtaaaaacatcataagtactcaagaactgctggctatgaacagcaacagctatacaattatgcattacaacaagaggtaatgtgtgtagaaccttagtttgcaaagtgttttctcatgcgtgttctggggtgggatcttacaggtctgagtttagatactggttcccttctcaccaactttgcaaacatggccaagttagttaacctttaagctgcagtttcttcatctgtaaaatgggatgataacagtatgaagctctcctcacaaggctaacaagaagacagaaacatagttaattctggacagaaatatagttataattgagcattaatcaggctgaactttgactcacttttttttgcaagcaaaagtcagggagcactagatactgaccacttggatccccattgttcctatagataggatttctagtgttagcatcataaggcttttgtttaagatagatagaatatctgacattagaatcataaagcttttgtttaagaattgctaaagcagatcctgaattctggttgaatagctgatgccaaccagtttgaagacccccacagaggaacctaatcagcattggaatacagtttctttatcttcctgctcatgacataaccctgtatgcttcaaccaatcatccatctccacactttgacccactctaaaacctttaaaaaccctaaccccagactcctcagggggatggatttgaggtatccttccatctcctcagtcagaagccctacaattaaacctctttctctgctgcaacctgccatcttggcatattgacttgctacacattgggcaatgaacctattatggttacaagtacataaagtataacttttatgtaaccataataagccaattatggttacaggtacataaagtgtataaagccgttctgaatgttaaattgaataatgtatgtaagttgcttagtgtatagtaagtgttcagtaaatgttagcaattgtttatcttcctatttattctcagaggtctgttctgaggagcctaagactcagagctggaagcattccagagcaggactgaaatcaaactctagtgcatgtggagcccttgcctgagaacattttccagtgatgacataagggagatgatatagtttggatgtttgccccctccaaatctcacattaaaatgtgattcccatgttataggtggggcctagtgggaggtgtttggatcatggcagaagatccctcatgaatggcttggtgccatcctcacagtaatgagggagttctcactctactatttcacatgagatctggttgtgaaaaagagtctgggacctcctgcctctctctcttgctccctctcttgccatgtgatacatctgctcccccttttgccttctgccatgaggaaaacttcctgaggcccaaccagaagctgagccaatgccaatgctatgcttgtacagcctgtagaaccatgagccaaataaacctcttttctttataaactatccattctcaagtgttctttagagcaatacaaaacaggctgacacagaaagtgtctcaggaaatgagctggaggctttcagaaggcacaccttgtacctgagccaaaaatgaagattctagtcccagaggccttaaagccagcaaaccctttcccatggaggaaggactccatttgaatctggcacagtgacacagagattctgtcactcccctaaatgagtacattaagttggcgttctccactaggcttctttctcaccatcaggaatgaaagccagtagggaagtcataatgggccttgatgtgcccagagagcccttggctgtcctcacagctctgctggccatgccctaaattaaagaaaatacaatacagggagtcaagaagtggggccagcttgggcctctttgatcagcatccatgatgctgtaggatgcatgattcagctctgagatctcctgctaagtcagaggtaatggtctccttacaggcacgtgtagcatttgcagcaagagacataaaagaactacattctgtttctgttgattctatcctccattcctcctacttattttctctttccccctccagttaactcccacattgtgcttactccgaccccaccttcttccttgtgaacccctaataactgagacaggtctcagtcaatttaggaagtttattttgccaatgttaaggatgcgcacctgtgacacagcctcaggaagtcctgatgatatgtgcccaaggtggtcagggcacagcttggttttatacattttagaaagacgtgagacatcaatcaatatatgtacaatgtatatggattcagtatggaaaggtgggacaagtggggtgggggggcttcctggttataggtagatgagatacaaaggttgcattcttttgagtttctgatcagcctctctaaaggaagcaatcagatatgcatttatctcattgagcagagggatgacttcgaatagaatgggaggcaggtttgctctaagcagttcccagcttagcttagtgattttggggtcccaagatttattttcatttcacatcctgtatgcagatgtctactcactcaactctgctactgagttttatatatgcatgatcctctgcatagaccacactgtcttgatgagtgtctatgcctgtctatgtacagtgttcactgcagtgtgcatgtgaatgtgtgtgttggtgtgacatagatatttagggtcagggacttaagccaaaaccatgaagctaaatcctaaaggaaacatactggtttgctgaactaaggtaaatctagaaattaagcttaccttgaaccaaagcttagaaaaaaagggcttaatttgatttaagacaaagaataatttttaaaaaaattgtttaatttttaaagtagataaaatgtttatatgattcaaaattaaataaacttttacacctatatttcttttttccacccttgtcctgcatatgtttattcacctttgcaaaccagtaacctgccaatgttttccttgaattctttttttttttttttttttgagatggagtcttgctctgttgcccaggctggagtatagtggtgcaatctctactcactgcaacttctgcctcccgggttcaagcaattctcctgcctcagcctcctgagtaactgggactacaggtgtgtgccaccacactcggctaattttttatatttttagtagagacaggtttcaccatgttagtctggatgacctcaatcttctgacctcataatctgcctgccttggactcccaaaatgctgggattacaggtgtgagccactgcgcctggcttccttgaattcttctagagattttacatttatatacaagcaaatgcaaatttacaattcaatctcttcctttccacacaaattagaaaactatgcatattattctgtatcttacttttttctctttataattcatcttagcaatctttcaatatctattcatagaaagtgtcctcattctctttatattaatacaactatacaatagtacaatagtctattatatggatgtactataatatgtttaaccaatcccctattggtggacatttaggttgttgtcaaatttcttgctacagtaaccagtatttactgcaatggataactaattttttttttttttttttttttttatatacagggtctcactttgtcacataggcaggagagcagtggtgtgatcacagctcactgcagcctcaacctcctgggctcaagtgatcctccaaccttagccctcgaagtagataggactataggtgtgtgccaccatgcctggcaaattttctgtattttttgtagagacaaggtttcaccgtgcttcccaggctggtctcaaactcctgagctcaagcaatctgcctgcctcagcctcccaaagtgcagggattacaggcatgagccaccacactctgccttgaataaccacttttgatagttgttgctaagttgcccacctacatgagacaccaaatgccatttgcaacagcgggtaggatagtgctcatttccttcttccatgatgacagtgtgcattagtacacttcatttttactaatttgatagtgaaaatggtatctcatggtagctcgagtaacatgagtaaggttgacattcatatatttaaaagctatatgtacttccttttttctttgaactgtctctttatattctttgcccaattttcttttggataattggtctttttttattggcctgtaggagtgcttaaaatattaaggacattaaacgttgtctgtgaaatgagttgcaaacaacttgctcccgtttgtcttttgacattgctcaagtagtttttgccaagcaaaattttgatttttatggaatttaatttttaaaaccttttcctttatgccttctagattttatctctcatagttagaaaggtcttcctgctctggatttatacaggaatgtttcttttaggacttactttttacttataatatttgattcatttggaatggatcctggtataatgcatcaggcataaatccaactctattttttccaaatggacccagagttgttccaacatcatatattgaatagtctattattttcctcactgatttgagatagcaactctatcataaatccctatatgtatttgaacctatttctaaatttttgattctgttgtactgatctgtcaaataacagaatatttaaaactgtgtaaatcactgagctatcagccaaaacagaaatatatcctaaaggacagagaaatttgggaaatgaaaataatactaaactgaagccttctacaggaatactcgcctttcacaatttcagtgtgaatctgaggagcggggccaggaaaaaggtcagaaggatggtcctgtgtgatctgaaggctgggcacaaacatccagatgatactcgtggctttgctatgttctccatgaagccttgcccgtccagccatagatatctggcccagggttgaggctctgacccaacagagagccaatcaaaaacctttccaggaatttctgaacttgagaccagaaagagaatcaggcagttcttggtggaggtaatcataaaatgtaaacctcggaactaccatgagccaggttttttctgcaagaaataggcagcagagaaagaataaaacaatacagagaaaaaagcagagatgatggaatactattcagcaatcaaaaggaatgaactacagatcacacaacagcatgaatcaatctgagtgaaatcagacaaaaataaatacctactagatgattccatttatataaaacccttgaaaatggaaactaatttgtaatgacagaaatcaggtcagtcacagctgggaaaggaggagaggagaagtgaggcaggtatgggagggggaaattacaaagagatatggggagattgggggtgatggatataatgatggtttcaaggtgtgtgcgtatttcaaaacttatacaactgtatgctttaaatatgcagtgtattttatcattttaattcaataatacctcaacaaagctgttttttttttttttaaaaaaaaagcagagatgggagggaaactagtagaaagaagcagaaaggagggttgtgagtaggagagagggcaggcaagaggaagaatggatttagattacatttgttctttagttatagatgcccagctgtgtctccaatttgttttcttaacctaaatttggattatgaggataatatagttatcattttgcccaagctgagtttctgacttttgcagacagaataataagaccaatatttacccacactcttcccaagaaagaatcagagtccattttgactattcttcctccttatctgtcacactcagtttatcacccagtacaaccaattctacctcaaaatatttcttgcatttgttttttcccttccagatgtgcagagtccaggctcccatcctcttctacttcgactcttttaaggcctcccaagggggctctcccccatcttctatctgccatgttgtttccaaagttacatatttagagcatagatctgattctttcatcccccttcttaaaaaaataatattggcaattggtgaccacttaacatggtatggtgctcactgagccaacccccagcgtcccctcccaaaaatctccagcagacccaccactctggcaagaattgaacctcagccatgccaagtatatttacccttgagtgctcttatcttatttgtccacctgacaaacttccaacatatttaaaggcccaactcaaatgttgcctttttatatctttatttggctctctccggctgaattaattgttccttcatctgtgttcccatagctcttatcatctctgttgtggtgattaatgagtctgtttttcccacaagatgataaacttctaaagagcagaaagtgtgtcttatttatttttatatccctagaaacaaggatacttcacaaaatgtagcaggtgcttaattaatgtctgtgtaattgatttaaatcgagggaattgaaatagatcaatggttttcaagcctttttgaatacccctcagtacaactctttaaaaacaaaatggtacaaggaatctcaacacgtagtttagatgaaggtggaactgatcttgttgaagagtaaattaatgtatttgatgcagatactattctggtatttcatagttttctttctgtctgcatctatatatataagaggtttgcttttctgccactttcctcgatttcctcatcttctccatcacctgatgaagactccattcaccctttttagatagaagtatctgtaacccttctgtatcatgaaatatcccccaaaacaactctttgtgctaccaggcgcccctgctcacagctttcatgtatcgtcaaaaattcccagtcatgaaaaaaccaaatgaacaagtttttggacaaagctgtctctgaccacagagaaagacagttctcataaagaggcttctgtttgctcaagttactaagctagtttccaaacaagttaaatgcaagcttaaatgtgtctctaaagtaccaaggagtctgggagtgaaaccactagttaagtcattcattcctcctgaggttaaataataataataggagtgcttttcctatttattcttccttcatgcagagttttaatttaaaattttgagtctgttgtcttttatttccagaataccgctttataaaattgattctgacgttgttttttgtcctgtattatctaaagagataccatgtattaattcttcctgcaattttataaacaaaactcattcaatatagaacccaatgggctacatctgtaacccacgggaagcattcagaatatttgtgatgtatcaaatttatgacaaagataaaactaaagcaatttcattgtgtttgtaggcaaaacgagggcatttagccagatgttcaccaagggctcttccaaccttgtgagtttatgattttagggcaaatgagaacaacagcataggtttcagattaattgtgtgagaagtatattgtctttgcacagatgaatagaacataacggcaacgaatatcaggaagaacatttccaaaattatcttaaatgctttattattgtacagcttcattttttggttttcttactttgtaagaaatgccactattgtggggtttcaagcgtaattcagcaaatggtatgtctaattgtaatttcttccatattcccaggacagaagccacaggaccaagagccattttgcaaggtcaatgggactaagtgagaaaaggggagaacattatccagttgtttatgtgtccagaaagagagtttttcaaaagttcatctcttggtaggaattcaaaatgcctttgcccaaaccattgagactatatggttaggttaccaggctagattctaagagcctgtttaaccctaaatataaaaagattattaaggcagacatggtggttcatgcctgtagtcccagctacttggggaggctgaggcaggaggatcgcttgagcttgctcctgggctgcagtgctgtgtgctgatcaggtgtctgcattaagttcatcaccaatatagtgacttcccgggaatggaagaccacaaggttgcctaaggaggggtgaactagctcagtttaaaaacggagtaattcaaaactcctgtgctgatcagtagtggaatcacacctgtgaatagccattgcactcttgcctgggcaacatagcaagaccccacctcaataaataaataagtaaataggattcttcaaaattttattttgatttatttagcctcatgtatagcatctttttcttaggaaaaaaagtccacactcccagctgtaatgccatagacatatctcccccagcccagcagtagaaacagacttgcagtgtgaagacagtctatgggcagggatcggtgtaggtgatcaaatccactcagtacacccaagctttatatctgcctaagagaaggcaaaattgttgcaaactggagaacaaggaaaagttaccttgaggagtggagttctgagtgtcaactctctcccttgctatatttaaattatattacacattgaatattcacaaagggctgcttgtctttgcattcattttgaatcctgttttgtgaccatgattggggacgcaaaggttttttgtcctttgtcatacttagtaaatggttttatgttccttgattatgatacatttgtttttgaaattcattgcaatatctaaattgatgattatcacaaatgagtgtcagtgcttggctgtcagtgtttttcttttagcagaaatgaatgaacaacattttttgaattactatcttgtgggtttcatttttaactactggaagagaaaaaacacagaatgaaaaactatattttgaaccaaacatgagctcaatcattcattcaacaaacatttattgagtaccaatcattgggctaagtgctttggagtataaaaagatgaatgaattgcatttcctgaactcatggaacatgatttgaggaaataagacagataaataaatagctctactaaaggtaaagtgaataaataccttaagagatgacagagctcttcgggcatcaaagtgggagcggagaccccattcagctgagaattttccagagaaattggcacataaactgattcttgttagagagggaggatttaaaaagtgttgaaacgggaccccgaggggagagaatggaaaaccactgatggttttagaaaggaaaatgacatgggttagctgtgtggtttagaaagatcacagatactagctcggtggctattgtaatgattcaaataaagctgtgagccaggtaagagaccgcaaatgtgaatggaacacacagatttgagagatgcttcagatgcagaatcaacaaaccttggggatgctttggaaacaagaggtggaaacacagatctggcaatcagtaaaggtaattactaaaatctaaaaatgtggttcttaagcttatcaagcacaagaattacctggagagcttatttaatggcaggtttcaggctccactctgccgagagaagattcagtgttgagcccaggaatctatttttaagcagcatcccagaagatgtggatgcaggtgctgggctgatcacactttgaaaagcactgcgatggaagtggaggtcccccagagtgcctaggaagaacaaaagcctcctgagaacagcttttgtgaaccacctacactcaggaggtgggaggaggaggggaatctgcacactggagctcctactgtgtaccccatgcttttcctgggatgtcctactgtgtgccccgtgcttttctatgtcctgggatagcaaggccttgacttcttggagcctccattctaatgtaaaataatacatacagtagacaaacacataaatatataacatgggtttaaatagtgccatggagaaaataaagcagaataagggcttgagagtgatgggacatggggaagtgggggaggggggaaggggagtgggggtggaggagcactttttgattgaataaggagaagcctctcaggcagtgacatctgagtagaaccctgagacgaggtggccataagaagatctggaggaagagcattccaggcggagaatgagatgcgtaacaattctgagttgagaaacagctggttgtgtctggggaatggctgcagggccaggcagggtccagtggggctgtagcagagtgagtactggggaggggagcaggagaggaaggcagaggagccagcaggagctgggccagggaaggaggacttttggctgtggccttgtaggccatggtaaaggtcttggagcttattcttagatgtgttggggacctcactgggagctctgaggagagtgacatgatctgacttgctttttaaaggaccagtttgtctactgtggatggtagaaagtaagtatggagtggaagactcaccagcaggccactaagctggtgcccagagatcacagtggttgggccatggatgggagcaggggagatggtcagaggcgggcaaacctgacatgagttttgaaggcagaaacaacacaactgctgaaggattagctgtggtatgtgagagaactttctggttttctagtgttttggcagaaggaacgattgaacatttaagaaataaacatgatgtaatgggatggaaggcaaaggaaaagaggacatcagagccttctatgtcttggtattgctaatgccttgcaccatgatgcgcagggcaagctcttaacaaatatgttttgaatgaatgtttggatgactcaatgctgcatttaagctagggaggcaaggactgaaaaagccattagatggtataattaagatgctgttgggggtcaaggtggacggttatgttactaaccagatgagggacatggaggaagctgcggttttcgggcaagaaggtaacagtttacagaggtgatgaggaagatcaacagaggagaatgggccttggcagggctgagctgacaccgatgagggagaggagtttgaacctagagtggtaacctagaccaactgaataatgtctgataccttgaagcagcaccataattaagtgctaaatgattcttcaccctctcctgtggggacatgtgtgtatgtatagatgagtgtgcttatacatttgtggagatttggatccatgagagtggtgtttgttaagaggaaaaggtgtttatatcttgagaaatatatctttgtgccagcaaattgcagaagaactttcttccatgcttccctttctctctttcatctctctcccttcattcttcctttttcttccacctggttttcttcattaataattttatattgattacatgttaaagtgatattattttgaacatattgggttaagtaatatataagtaaaattaatttcacatctcttgtaacttatttaatgtggctactaggaaatgtaaagccacagatgtggctcgtgttgttttccatgggtcagcgctgctgtggagcctcacactcagcggcaatgttcttgcctgctttaaagacctttaatcaatgagctaagatactcccttggaaagaggttctaatttaactatcctggtaaacaagaaggaaataaaggatttctgaccaaggtcatactttaacaaggccctaggacaaatgggagtagatgttgtgtttccaagctgaattggtgacttaaagtgtgtttcaaaagagcctgaggctactttctaaacaataagtcagtggactgccctttgtgtaagtgtttctaagcataggtaaactttgggtgtcctttcatctgtgaccctatgaactattttggtcagaaaatatggttgcaaaaggcttaccccattccagtaaacagcatccattatcacttaatggatagaatcttggagaagtagttcacatgtataacattttatcttttccagacaggcccattaaattagttttaagtacctcataaaataaggccatattccaagtttgtgttcctataagattatctttaaataaaataatataaagaccttttctcttgacacaataaactaccattttaatacaacctcctgaatttgagaaaattgtcctatctaagtaatcacttttaattggttaaacaatctgcctattctatgcaaacttacaacagcaaaactgataccacattgggctagtaccccacctgctttttttttttttttttttttttttgagacaatcttgctctgtcacccaggctggagtgcagtggcacgatctcggctcactgcaaccgccgcctcccaggttcacgccattctcctgcctcagcctcccgagtagctgggactacaggcgcccaccaccatgcctggctaatttttttttatttttagcagagacggggtttcaccgtgttagccaggatggtctcaatctcctgaccctgtgatccgcccatctcagcctcccaaagtgctaggattacaggcgtgagccgccatgcccagcctatatcacctgtttttaaagatatgtgtacaagtttttgttgcacctgcttcggttttgggtggtatatacaaaggagtggaattgctagatcatatgctaattttatgtttaacttaatgaggaaccaccaatcaactgagcaccttttacggcatcctctctgaagactttcttgaactgtcctttccccttccacccaagttatccctccttctattcccaccatttccaatttacacatctcttagcacttgaacttgagtttaataaccttatattacctgcctcctatcagtagtttgtaaacctcttaagagcttacagaccttattttcctttgtattgtttacttcaactccatttatctttgatgtagtaagccctcgataaatctttactgggcaaaatcatagaaggctgttctgggtgcagaaaagacttagcttcaaacagggtgacttttcatttggggaaccaagaacttgagatgttgtgaagtggtaattgctgtttttatctgtaattgctgagactatgctggctcaccaaggttgctattatatttatttagacaagaaagagagggtgtatgtgtctgtatgtgtggggaaagggaggctgtatttggtatgctacagctttttgacagtaagctacatttacaaaatctgtctaccagccaagtgacctcaaccaatgtgggaggaacttctcagaacttcaactttgcacaagcctgagttgctgggctcctggctggatatgtagatgtctgaaaatgctgcattttacaagccatggttctgcctagggaggctaaaatttttggtaatcttgcaaaaatcacaagggttttaattaaattgcttccagcaaagctttacttaatgggtcaaaggacaaaatgttgaattaacacaaagaatttcctaatggagtgaaaacaaatgggaggtggcttctctcgtgaacttcctgtaattggaaccaccaatcagaggtgttggcatgagggctccctgaaggaatcctttttttttttttttttttttttgcctctgagtcagcatacaaaatgaaatgctgaagaaaggttggctttccaagtgcatcattgctgaggatcagacagagaagctaaggcattgcttttctgcttgctaagagcttatcatctagctgtagaggtgtgaaagggacacaaaagatcataataaatgtaggtagcatgtaagagaactaaaggaataatataaacaattggcattagtggcgttagttgggatggaagtcgaggggcgagtgctcactgcagccttgggtgggaagagagatgtcacttgagcatgtccttgaattgtggagaagttcgttaagacaggcagagagggtgctgtgtgccaaaggaaaagcatgatgattgtgaaaagcgtgtgaaggtcaagggccatggagtaatctagtttgaatcgagtaggacattcaacggtgctgatgcaagaatggtatgggtacgttgagaaccagattgaaaagagcactggaaataaaaataagtttaggcaaggccaagcatggtagctcacacctgtaatcccagcactttgggaggccgaggcaggtggatcatctaaggtcaggagttcgagaccagcctggccaacatggagaatccccgtctctactaaaaatacaaaaattagccgggcatggtggcaggtacctgtaatcccagctcaggaggctgaggcaggagaatcacttgaacccaggaggcagaggttgcagtgagccgagatcatgccactgcattccagcctgggtgacagagcgagactccatctcaatcaatcaatcaataaaagtttagacagattttcttctgtagggagtgagaagtgtttaggtttctgagcgggagaatgatacattgacagttatatttacagcaaagtaatctaacaaggttttgtggactggcctaactggagaaaataatggaaaagagaaataaattaagagcctattgaaatagtacagctgagaacagagaacttgaactacagtggtgggaatagggatataaagaagggtatggtgggggcaggtagacccaatcaataaagttgaggtctctttttttttttgagatggagtttgcttttgttgcccaggctggagtgcaatggcgtgatctcggctcaccgcaacctccacctccggggttcaagagattctcctgcctcagcctcccaagtagatgggattacaggcatatgccaccatgccaggctaattttgtatttttagtagagatagggtttctccacattggtcaggcttgtctcgaactctcaaactcaggtgatctgccttccttggcctcccaaagtgctgggattacaggcatgagccaccgtgcccggcctaagttggggtctctttagttttaggtaggtattttaaattgatgggttttatttttaatgtctctgttcctacttcattttccccagacactgctctgttggacatcagaatcccttagctgaccaacacacagtcatgggactgctctcattcatagctttggttctaacctcaagtgggtcccaagtgctgcctggcagtctgagcacatttctctagtggattcactggagtatgagctctgcatggacagagatctctgtgctatcccagctgcctggaagagtgcctggtacatgacatgtgcagtgaatgtgtatggctaggcatttcatattctctcgcctttcctcagacctcaaattcatttaccacaatttgcactcagctgttggtcttactacttgttccactgtgaaaatagaattaatctgaagagaacatccacacactcccacaacaaagtcaaccagcccacgtgcaaccttatccacagggctccttcccactcatcaccattcagcttgtcccagctgctgtctaaggctaaccctcccaactgtgcaatggatattacccttcctactggttgactcttctgtctcctgcatgatcagttttgcctctcaatgggataattcccatcagtatacagagaagttctggaggaatccctgaggtggaaaagcaaagaggtcctctggtgtgtgtctgaggtaggatgctagcaacttgcacagacctgtccgcagggctgccttgaggtgggttgcaggcacccacaacacctgctaaaggagtttacacagttttcccagtacataattttacacctgaaaataagtaggtgctcgataaattgtcactgaagaatggatatctcccatcttcaattgtcccttccttgattccacatcccttccagctaccatcccatttatctgcacccttttttggcaaaatccacaagatcattgtttatatactcactgtcttctcctgtcctcttagtctctcttgctgtcacttgtttggacttttgtctttactcctctactgaaacttctcctttgagatcaccagtgacctccattttgccaaatccagttcttagaccttttctgatttgacctttcaagcaccatttgacaagtgagtcgcctcttcttcccttttcctcactggccccttcttctcagttgaatttgctgcttcctattcagctctccaatctcttcatgttgtagtctcccagcttctgcccccagacagctcttttctatcaccctctccatcttaatgtcctgtctcagtgctggtgactctcaagtgtacatccaggccctggatgcaagactcatgtattcaacatctcctcttgggttttgaatagacatttctctcttctaaatttcaggcacatagaatcataatctgtggttgatgacactcttgtttttgtcagtgcttggccctctttctaaattttatttatttattgttttaaataatccaataaattcctgtgaacacacatcccaatacagaaaatagaacattgacccaaggcccacaaggccctacatgatctaactctatgcgtcctcatctgctagcattctccttgctgttcctttggcatagtctttgaagttgctatttcaactgtctagaatactcttttctgagatatcttcatgtctttctccctcattttatttgcgttgttacttatcagtgaagcctcctcagcatcttcattaaaaataatattcttgcttggctcctgatatagtttggctgtgtccacacccaaatgtcatcttgaattgtaattcccataattcccatacttcccatgtgtcgtgggagggacctggtgggaggtaatcgaatgatgggggtggttaccctcatgctgttctcatgatagtgagtgaattcttataagatctgatgttttgttttgttttatttgagatggagtttcactcttcttgcccaggctggagtgcaatggcacgatcttggctcactgcaacctctgcctcccaggttcaagtgattctcctgcctcagcctcctgagtagctgggattacaggcatctgccaccacacccagctaatattttgtatttttagtagagacagggtttcaccatgttggccaggctgttctcgaactcctgacctcaggtgatccacctgcctcagcttcccaaagtgctgggattataggcatgagccactgtgcttggccgagatctgatggttttataaggggcttttcccccttttgctcagcacttctccttgctgccaccatgtgaagaaggacatgtttgtattcccttctgccatgattgtaagtttcctgaggcctccgaagccatgctgaactgtgagtcaattaaacctctttcctttataaattacccactcttggatatgtctttattagcagcatgagaacggactcatagagctcctaggtcactttccaatttgcttattctgatcatcacctcctttaacttattatgtgtgtatttgtttattgtctgtcttctcccagtagattgtatgctctgtgagggcagggacctgttcttgttcactactctaagccacaagctagaatagtacctggtacttggtagccacttgttgcaggttggttctctgggaagcagactctgcaataatttgatgtgcatgacttctattagggagtgctcttaggatcaacagctataaaagggaaaagaaggaaacaggatggggcagaggaagaagttgagctgtgatgcagtcttgacgatagccccagccaatctcataggaggctctgaagttgttccaaattagtgtatgggcctgaacctttataaacccacatagaccagttattcatgcaggttgtcctagaaagggggcatgactttggagaaggggctctttttaggtagacaattgtattgtgtgataagggctgagggcttgctgtcagcagcacccccaggagctggatagcacatcacagtgtccgtaagagcacccaataaggtgtatggttgaacacatgaactcagtgagatctaaaaacagagtggatgcagtgaggttcatgacatgcaagacagaaagacaaggagaaccaggtcagtgaatcctcatgcccaaagtcctccattttcttgtttatccattttcctattatagacaaagccctgtctgggtactataagggatctaacatcacagacaatgtccctgacctcaaggaagagaatgaaacctaggcacaaacatccatggtacaaagcattgtgatataatttacatgtatagcacaaatgggtgcttatagaggggaaagagaagggagagcccttcccgcagagggaaggaggaggaaggcccagggaaggcaacatggaggaggcttttgaagccctgaaagagaactaagatttcgttgcacaagggaggacagagggcagccagcaggaaaagaggtagtagaacaagggttcagttgtagaaaatcccaagcttggggtcaacagtcctctctcctcctatgctctgatacttaaaggttggaggcttgaccacatatgaatccctcaaatgccatacaacccgtgtgttcaggtcaaatcctgaaagaggaaagaaagtgctgcctctttgcctgccaacacaatcagcctcaggggctaaatttgtagttctgtgtgacttgttctatttttaaaactgtaatgagccagtaaatctaatcatccaaactgtaaagcagtccattgtatttgggaaatggagtgtaatctgcatggaaaagaccatacctttctgaagagaaaccaatgggatgttagctgggtccctggttttaaaagtttagactcaagtacgtggtataaaactcatcactagggtaatgttacagatgaagaaactgaggcacagaaaggtgaagggacttcctcaaagtcacacaacagatcagtgtttgaggtgaaatccaaccataaacacacagtccctgcgttccttgaacagccctctaaagcttttggtcagagctccttgtatgatgtctgctttcctgcttcttgaattaaccgcaacaagagccactggccagccaatccagctgcaggtcaagtggcccctctcatctaatcgtaaccactgcaaagaggcctgacagcaatggagtcagcttggagtgtgttttcttgtagctcgtggatggcaagcccagaaataaactatgggctttattgttggagtaagagaatgatttacaaggccctggcaggtcatcggccttggctctgatggaaagaaggaaatagtctggggctgcaatttcagggagtaacaaatagtcacttgaaaccatggtttcagcttgagattccaacttggctttgtgttttcctgccagttaactaatttctgtttgcctaacataatcaaactgagtagcaacttcctcatgtgcttctaaaacagtctcttcccccactccccatactagaaaggcacccagcattttttaaggaactagactcctttgactattgaacagtgatctcagactttagcttggaatgtgtagagtatcttgtgatcagaccagggaccaaggtgaacactgggtgccaatagcagttactgcagggtttgactttctagaatcaaaacccagatgggaaatgacactgtcagaaattaggcctgaaagatacaatgagcccacatacaaaattattcaaaatgtgttatcagacctcaagaaatatagaagcaggtaaatgtttattatttattccaaacgtgatggcttttaactagtgaagaggcacgcccagttttcttagtagcaagccacatgaccacagatacctgggtgtggaccacatgaatcctttattcataattatgggaattcaaatggtccatgcttgccctacaagttctggcagggaccaagtacatacagatgttcagttgataccaattattctatttgtcaggatcccccacaatgcccagtttcaagatgaaacttgggtaggatgaaaggttatagaattacactcaggctcaaatatcatcattaatgtataaaagccagctagtgttagaccaggcagaagcagtgtgttaggccattcttgcattgctagaaagaaatacctgagactgggtaattaataagaaaagaggtttaattggctcatggttctgcagactgtacaggaagcatagctctggcatctgcttggcttctaggaaggcctcagggagcttttactcatggtagacggcaaagagggggcagacacatcacatggaaaagcaggagcaagcaagagagaatgaggggaggtgccacagacttttaagtgaccagatctccctggaactcactatcacaaggacagcaccaagccatgggggattctcccccatgatcaaacgcctccaccagaccccacctccagcactggggattacaattcagcatgagatttgagtggggacaaatacccaaaccatagcaagcagttacacagctgttgtgcttgtgtgatggagcttattagatactagtggcccgccagcttaagggttaggcaactcgtaaaaacgtttttgcttttctaaaaatcttagaccagccactccttatgggtcacagtttggagactacagttcaacctgtcacttgttagtgcctcaagtttccattctctccatcattcacttctctatgccagacttttgtccaattgtcttgttcaaagatggattaaccatgccattaacttgaccctttcacatctactaggtacctgattctatcgttctccgcatggctgcaaatctcaatttaatcatttcttactattcagattctaccatgatggcctggtggtggtgatggtgtgtgtgtctgtgtgtgacatacgtcatcttgtttcgttctaaaagcagccatgctcattcccattttacagatgacaagatgagaggatgcagtaatgacatggtaacaggtgccagatgaatgcagacctcataggccaggacagtttagctcaagtgggaaacgactggagggttgttaggaagtacatgatgtgatctgccttatgcatttgatcactgtggctgccactgtgtgaataacagacttggtgataagagtatcgaggagcctgcgaggtacttcagaagagagttcatagcttctgttgcccattgctaatccttgatcttcactcacccagcaggctgaaagcaagtgagggaagctttggtgctgcctaggatagcaagatactggttcttctcccacatcccctccacccattgctgctcaagtgccccttgggtggagtggttggaagcagactcaacaggactgactgctgtcaaaccctcttccctttcagactcagtgacactgatggctctacctcaggaaggccacgagccaagaatatcccataaggctaagatgcttgatagcctgctttggtttggttctggttttggtaagaagggagttatggggtgttgggggacatggggaaagaggtatgatgatgaaagacaaattgaagtaaaagctggctgcgatgaccagtgaaagagaggaaaggagaagaaaggaagtcacagaaagtgcccacatttaccgaagattcttatgatgccaccaatccagggactatggaagcagtaaaaagagggtttggggcttcatcccacttttgtgtccctcacaaatgtttggggtggcagattattctgcctaactaccattccaacccctttcctccctttatatctcccttcatttttttctttctctctccctcccttccttccttccaacctgagaggcttttgatctgtcatgtagctgatttcaggatagtcattttctttttacgtgtataaggcactttcctactaaatcggagcttcccaagaacagcaattgaatcttataattgtacctcctgaggtgcttggtacatgctacatagatgattgatggatcctggcatgattgatgccaaggtctctcatctatgagacagagataagcattctgatttcgtggcttgttagaaagatcaaattagacagcatgtatgagcatctctgacacacagtaaatcttcttcaataagtctatgaatctgaattaactggggtctttccacaatcattgggccaaacccatcatcagttatttggattgggtggatgtggccttagtcatctgtgtctaagaccgcccactgggagatgggtacatctctcattatgggaagccacagcagagtggggcaacatgattttctgatagggccacaagttctgggagtgattatattggaccagcatttctgaattcataattgtcagtttcttacctggaagtttgcctccccaagctaagttctccctctctattgtgtgtcccatggtcactgaagacagctatgcttttaataagcaatcatttgtggagcggctaccagggacaaggcattatgttaggggctgtgagggagaccgacagaaccaccatttgttgagtattgttttctgtgtaccaaactctgagctaggccttttatataccttatttcatttacaaagatgaataaagtttctcaccatgaggaggtaaatattatttaaggaaataagcatatagacacaaaaggataatgaagaaggaagaagtcattgctaagggtgtggtcatgaaagtctgcaaatgaaaagttggatttgatatgggcttgcaaggaccagcaacatttgggaagggagagagaagaaaagtaggccaggccggacgcggtggttcacgcctataatcccagcactttgggaggctgaggcgggtggatcacctgaggtcaggggttcgagaccagcctggccaacacggtgaaaccccatctctactaaaaatacaaaaattaggcaggcatggtggtgggcacctgtaatcccagctacttgggaggctgaggaaggagaatcacttgaacctgggagacggaagttgcagtaagccgagatcatgccactgcactccagcctgggcgacagagcgagattccctctcaaaaaaaaaaaaaaaagaagaagaaaagaaaaggaggccatccactggaagcattgcatgagcaagtctacaaatggggatgaatttctgtgcccatcaggcattgaggaacccactcctgaggactgagtaggataaccccctccaataactgagagacaatagcgtcagcgtcaaacaaacttggactcaaatcccacttgtgtcacacactaactaaattagtaaacctttctgagtctcaatttcctcatctctaaaatgggaataaaacgtttcatccccagagtctgaaagaggattagatcaagttatactatatgtaaagtacccagccctttatgctggcaatagtgagaccagaaaaacagtttacatcatgtactatgtggaaattgattgagcttctggtgttagagccccacatggtttgcaaaacattctcacaaacactacctcaacagagatagcctcccaataatcctgtgggtaggtagaggtggcatgactctgattcccattttaaatttgggaaatctgaggtttagagaagccttgactttcccaagttcctggctttagggtcagacagacctgagttcagaagctgactctgtcagtgagcagcagggacacttaacctctctgagcctcagcttctttatggcctgtggtcaactttttacatccacattatttcctaaatatttaattttattatttcaattcttgaatagatagtacaagtttcaaaaattaaaaaaatacaaaaagctacatgatggaaagtctccctcccacttctgtccattatgtgccctgttccaccacatcctatgggtaatctgtgactcctatgctagttttctgtgtatccttttctggtctctttatgcatatagaagcaaatccaaatgtgtgtgtgtgtgtgtgtgtgtgtgtgtatatatatatatatgtacttctgcaatttacatcattttttaccaacacatcttgggtattttttcatatcagtaccttccagcttccatatttttttcacagttgcatagtatttcattatatgactatacaccacctttacctacccacaggattattgggaggctgtctctgttctggtagtgtttgtgacagtactttgcaatccatgcagtcctttttttttttttttttttttttttttttgagacagagttttgctcttgttgcccaggctggagtgcaatggtgcaatcttggctcatcacaacttccacctcctgggtttaaccaattctcctgcctcagcttcctgagtagctgggattacaggcatgtgccaccatgcccggctaattttgtatttttagtagagatggggtttctccatgttggtcaggctggtctcgaacccctgacctcaggtgatccacccacatcggcctcccaaaatgctgggattacaggcatgagccaccgtgcccagcctgcattctcctattgatgggcatttaggtcattgccaatcttttgctattataaacaatactgcatattgcatataaacatttgcatataaacaatactgaataaccttgtgcatatgtcactttctatatgagtacactgtaggataagttcctagaaatacagttactagatgaaacaatttgtgcatttgtaattttcatagctgttgccaaattgtcctccatcaggttttactcccacccacagtgtatgagagtgcctgtttcctcatgtctttaccagctcagcatgttaccaaacccttgtatttttgccaatctgacaggtaagaattctatcttgagggagttttaatctgaatttgtcttactatgaatgagattgagcgtatgtccatatatttaaacaactatttgtattttcttcaccgtgaactgtatgttcataatctttgcccatttttctactgagttgttgggctttcatattttataagaaggaaatttacatagggaaaagtgtgtattagaaacctaagccctttgtttgtggtatgagttgcaaataactttctcatgttgattttgctccttacgtcagttatttttttctgtgtacaaaccatcccaaaattgtttggctagaagcaacagtcacttgtttgctcaagattctatggtttgggttccgctgagacagttcatctgtattcgtatggtggtcacaggttccaggaaacagcaagagagcaagcaccaatgcccacgtgctttaagaccctacttgcatcacatttgttattgtccctgtggctaaagcaagtaatatggcaaggctagagttaggatgggaagggaataccaaagatgtgaataaaaggaaggaattttgtggctatttttgcaaacaatctaccacacttatgacatttgtttgcttggtttttatttcttttcttggtgatagtggtgttagtttatttttctatcaagtatgaaatttttaagtaatgcagtttgtaatgcaatcttttccttcaaaggttctgagttttgaataataattagaaagcccttccccactctcagcttatgaaggtaattcctattttcttctagtacttttacggcttcatttatcacatataaagtttgatccatttagaattcacctttgtgttcactccacatatatgttcttagctaaagcctagttctcctctatttgggaaggttgtcttttcattcgggattggcaaagttatgaccaataacaaacaacttttaaatctcagtggcttttaacagcatggtttatttctggctcattctatgtgcccatcatggtttggcataagctcagttccatatgaaccttcctccaggccccaggccagtggaccacttccatctagtcttccattaccagtctcgcccagagggagagaaagcacaaccaagcatgcactgcctctcacagcctcctcttggagatagcccatgtccctcccattcatatttcattggctaaagcaagttacatgaccaatcctgctgtcaacagggtagcaaagtacaatcctcccgagaccttagggacagcaaatattgggaacatttcatcctccatcatcgtcctttctgttgatgtgcagctttgaaaaagcacacacctggagccagaagcaggctggggagcccatctcaccaggtaggccggcacatcatcactggcctgtgatgatgtgtctcagagccaaattaaccccacacccaacctttctctccaagatcttgcatcctgctcagagcagagagcatgtgtgcagtcaggagcagcagagtggagatagggaggaaagtgggaatcctccagggaacattaggatcaaactgtgtcccactatcttaatccatttgggctgctttaatagagtaccatgaactgggtagtttaaacagccaacatgtatttctcacaattctgaggctgaaagttcaagatcggggtgtcaacatggtcaggttgtggtgagggctctcttctgggatgcagactgctgaccttttgtttttcctcacatggaagagagaaggtgagagagctctccggggtctcccagctttttgttgtcgttcttgttgttgttgagatggagtttcgctctgctgcccaggctggagtgcaatggcgcgatctcagctcactgcaacctctgcctcccaggttcaaatgattctcctgcctcatcctctcgtatagctgggattataggcacccaccaccacgaccagctaatttttgtatttttttagtagagaccaggtttccccttgttggccagggtggtctcgaactcctgacctcaggtaatctgcccacctcagcctctcaaagtgctgggaatacaggcatgagccaccgtgtctggccaggggtcccttttataaaggcactaaatctcattcatgagggctcctccctcatgatctaatcacctcccagaggtcccatctcccaatgccatcacatcagggattaggatttcaacatatgcattttggaaggacacattcagtccatcacacctcccaaaaagatatactagagtcctaaacatccccctttagtacctcagaatgtgacttcatttagagttagaatttttttttttttttttttgagacaaagtcttgctctgtcacccaggctggagtgcaatggcatgatcttggctccctacaacctctgcctcccaggttccagcaattctcctgcctcagcctccccagtagctaggattacaggtgcacaccaccacacccagctaatttttgtatttttagtagagatggggtttcaccatgttggccaggctggtctagaactcctgacctcatgatctgcccaccttggccttccaaagtgctggaattacaggcatgagtcactgtgcccagcctggagttaggatctttagagaggtattcaagttacaatgaggtcattagggtgggtctaaatccaatatgaatggtgtccttatttttttattttttattttttattatactttaagttttagggtacatatgcacaatgtgcaggttagttacatatgtatacatgtgccatattggtgtgctgcacccattaactcgtcatttaacattaggtatatctcctaatgctatccttcccccctccccccaccccacaacaggccccggtgtgtgatgttccccttcctgtgtccatgtgttctcattgttcaattcccacctatgagtgagaacatgcgttgtttggttgtttgtccttgcgacagtctgctgagaatgatggtttccagcttcatccatgtccctacaaaggacatgaactcatccgtttttatggctgcatagtattccatggtatataagtgccacattttcttaatccagtctatcactgatggacatttgggctggttccaagtctttgctattatgaatagtgctgcaataaacatacgtgtgcgtgtgtctttataacagcatgatttataatcctttgggtatattcccagtaatgggatggcttggtcaaatggtatttctagttctagatccctgaggaattgccacactgacttccacaatggttgaactagtttagagtctcaccaatggtgtaaaagtgttcctatttctccacatcctctccagcacctgttgtttcctgactttttaatgattgccattctaactggtgtgagatggtatctcattgtggttttgatttgcatttctctgatggccagtgatgatgagcattttttcatgtgtcttttggctgcataaatgtcttcttttgagaagtgtctgttcatatccttcacccactttttgatggggttgtttgtttttttcttgtaaatttgtttgagttcattgtagattctggatattagccctttgtcagacaagtagattgcaaaaattttctcccattctgtaggttgcctgttcactctgatggtagtttcttttgctatgcagaagctctttagtttaatgagatcccatttgtaaattttggcttttgttgccattgcttttggtgttttagacatgaagcccttgcccatgcctatgtcctgaatggtattgcctaggttttcttctagggtttttatggttttaggtctaacatttaagtctttaatccatcttgaattaatttttgtataaggtgtaaggaagggatccagtttcagctttctacatatggctagccagttttcccagcaccatttattaaacagggaatcctttccccatttcttgtttttgtcaggtttgtcaaagatcagatggttgtagatatgcagcattatttctgagggctctgttcttttccattggtctatatctctgttttggtaccagtaccatgctgtttcggttactgtagcattgtagtatagtttgaagtcaggtagcgtgatgcctccagctttgttcttttggcttaggattcacttggcaatgcgggctcttttttggttccatatgaactttaaagtagttttttccaattctgtgaagaaagtccctggtagcttgatggggatggcattgaatctataaattaccttgggcagtatggccattttcacaatattgattcttcctacccatgagcatggaatgttcttccatttgtttgtatcctcttttatttcattgagcagtggtttgtagttctccttgaagaggtccttcacatcccttgtaagttggattcctaggtattttattctctttgaagtaattgtgaatgggagttcactcatgatttggctctctgtttgtctgttattgatgtataagaatgcttgtgatttttgcacattgattttgtatcctgagactttgctgaagttgcctatcagttttaggagattttgggctgagatgatggggttttctagatatacaatcaggtcatctgcaaacagggacaatttgacttcctcttttcctaattgaataccctttatttccttctcctgcctgattgccctggccagaacttccaacactatgttgaataggagtggtgagagagggcacccctgtcttgtgccagttttcaaagggaatgcttccagtttttgccaattcagtatgatattggctgtgggtttgtcataaatagctcttattattttgagacacatcccatcaatacctaatttattgagagtttttagcatgaagcattgttgaattttgtcaaaggccttttctgcatctactgagataatcatgtggtttttgtcttcggttctgtttatatgctggattatgtttattgattgcatatgttgaaccagccttgcattccagggatgaagcccatttgatcatggtgggtaagctttttgatgtgctgctggatttggtttgccagtattttattgaggattttgcatcgatgttcatcagggatattggtctaaaattctctttttttgttgtgtctctgccaggctttggtatcagaatgatactggcctcataaaatgatttagggaggattccctctttttctattgattggagtagtttcagaaggaatggtaccagctcctccttgtacctctggtagaatttggctgtgaatccatctggtcctggactttttttgttggtaagctattaattattgcctcaatttcagagcctgttattggtctattcagagattcaacttcttcctggtttagtcttgggagggtatatgtgtccaggaatttatccatttcttctagattttctagtttatttgcattagaggtgtttatagaagtctctgatggtagtttgtatttctgtgcgatcggtggtgatatcccctttatcattttttattgtgtctatttgattcttctgtcttttcttctttattagtcttgctagcggtctatcaattttgttgatcttttcaaaaaaccagctcctggattcattgattttttgaagggttttttgtgtctctatttccttcagttctgctctgatcttagttatttcttgccttctgctagcttttgaatgtgtttgctcttgcttctctagtacttttaattgtgatgttagggtgtcaattttagatatttcctgctttctcttgtgggcatttagtgctataaatttccctctacacactgctttgaatgtgtcccagagattctggtatgttgtgtctttgttctcgttggtttcaaagaacatatttacttctgccttcttttcgttatgtatccagtagtcattcaggagcaggttgttcagtttccatgtagttgagtggttttgagtgagtttcttaatgctgagttctagtttgattgcactgtagtctgagagacagtttgttataatttctgttcttttacttttgctgaggagtgctttacttccaactatgtggtcaattttggaataggtgtggtgtggtgctgaaaagaatgtatattctgttgatttggggtggagagttctgtagatgtctattaggttgctttggtgcagagctgagttcaattcctgaatatccttgttaactttctgtctcattgatctgtctaaggttaacagtgggatgttaaagtctcccattattattgtgtgggagactaagtctctttgtaggtctctaaggacttgctttatgaatctgggtgctcctgtattgggtgcatttatatttaggatagttagctcttcttgttgaatttatctctttaccattatgtaatggccttctttgtctcttttgatctttgttggtttaaagtctgttttatcagagactaggattgcaacctctgcctttttttgttttccatttgcttggtagatcttcctccatccctttattttgagcctatgtgtgtctctgcatgtgagacgggtttcctgaatacagcacactgatgggtcttgactctttatccaatttgccaatctctatcttttaattggagcatttagcccatttacatttaaggttaatattgttatgtgtgaatttgatcctgtcattatgatgttagctggttattttgctcattagttgatgcagtttcttcctagcctcgatggtctttacaatttggcatgtttttgcagtggctggtaccagttgttcctttccatgtttagtgcttccttcaggagctcttgtagggcaggcctgatggtgacaaaatctctcagcatttacttgtctgtaaagtattttatttctccttcacttatgaagcttagtttggctggatatgcaattctgggctgaaaattcttttctttaagaatgttgaatattggcccccactctcttctggcttgtagagtttctgctgagagatcagctgttagtctgatgggcttccctttgtgggtaacccgacctttctctctggctgcccttaacattttgtccttcatttcaactttggtgaatctgacaattatgtgtcttggagtttctcttctcgaggagtatctttgtggcgttctctgtatttcctggatttgaatgttggcctgccttgctagattggagaagttctcctggataatatcctgcagagtgttttccaacttggttccattctccccgtcagttttaggtacaccaatcagatatagatttggtcttttcacatagtcccatacttcttggaggctttgtttgtttctttttattcttttttctctaaacttctcttttcatttcatttcattcatttgatcttccatcactgataccctttcttccagttgattgaatctgctcctgaggcttgtgcattcatcatgtaattctcatgccgtggttttcagctccttcaggtcctttaaggacttctctgcattggttattttagttagctattcatctaatcttttttcaaggtttttaacttctttgccatgggttcgaacttcctcctttagctcggagtagttcgatcgtctgaagccttcttccctcaactcaactcaaagtcaactctcaactcaaagtcattctccatccagctttgttctgttgctggtgaggagctgcattcctttggaggaggagaggtgctctgatttttagagtttccagtttttctgctgtgattttccccatctttgtggttttatctacctttggtctttgatgatggtgacatacagatggggttttggtgtggatgtcctttctgtttgttagttttccttctaacagtcaggaccctcagctgcaggtctgttggagttttctgaaggtctactccagaacccgtttgcctgggtatcagcagcggaggctgcagaacagcagatattggtgaacagcaaatgttgctgcctgatcgttcctctggaagttttgttccataggagtacccagccgtgtgaggtgtcagtctgcccctactggggcgtgcctcccagttaggctactcaggggtctgggacccacttgaggagacagtctgtccgttctcagatctcaagctgcgtgctgggagaaccactactctcttcaaagctgtcagacagggacatttaagtctgcagaggtttctgctgccttttgtttggctgtgccctgcccccagaggtggagtctacagaggcaggcaggcctccttgagctgcggtgggctccacccagttcgagcttcccagctgctttgtttacctacttaagccttggcaatggagggtgcccctcccccagccttgctgcttccttgcagtttgatctcagactgctgtgctagcaatgagcgaggctccgtgggcataggaccctccgagccaggcacaggatataatctcctggtgtgccgtttgctaagaccattggaaaagcacagtattaggatgggagtgacccgattttccaggtgccatctgtcacctctttccttggctaggaaagggaattccctgaccccttgtgcttcccgggtgaggagatgcctcgccctgctttggctcatgctcagtgcactgcacccactgtcctgcacccactgtccaacaatccccagtgcgatgaacccggtacctcagttggaaatgcagaaatcacccgtgttctgcgtcgctcacactggcagctgtagactggagctgttcctatttggccatcttggctccaccccaaatggtgtccttataaaaagaaaaagttcggacacagaggcagatgcatagaggaaagatgatatgaagagatataaagagaagatggccatctacaagccaaagagagaggtgtggaacagatcctttctcgcaggctcatgcctgtaatccaagcactttgggaggctgaggcgggcagatcacttgaggccaggagttcaagacaacctgaccaaaacctgtgaaatgtggtgaaaaccagtctctactaaaaatataaaaattagctgggcgtggtcatgcacacctgtagtgccagctactcaggagactgagatgagaggatcacctgatcccagaaggtggaggttgcagtgagctgagatcatgccactgcactgcagcctgggcaacagagtgagaccctgtctcaaataaataaatcagtgtgggttctgctgaccagggattccactcaggccccaggacattctgacttagtgataacagtaggggtcacacaaatttgtgaactggtaaatcaataggcagggctgctaggaatcgatgcctgagggcttctggctgaaggatgaggaaggaggaatggagaggaagcatagcatctgccttagatactggtcctctgcctggccagtgacgaagcaatcagcccttcccttatatggaggccctagtaactagtggaagaaagtcaaggtctcagacaaagtgatagctcgttaatatttcaccagatgtcagcatccctttcaattagccgtttgaagtttgctatattaagactacaaggtctgctcttcccagctctgcaaaatattataagatctcttctcctttagcaggattccaaattcctgctaatgacaaggtgtttatcagaattgagactacctttgcagaaattataacagtgagaaaattatggcagttggggagatctgatctagccaactcatttctggcctttagccttcaagctatacttaattattactgggcttgggccaagctaattttgggagacatttagtttatagtttaagtgagaatagcccttccgccaaacttaactgcctttgtaaagctaatgagagaccaccaggctaggaggataggggagcctgaattctgctaaggtgtagacataaacaattgccagccattactccagaagtcacaatgacacaggatttttcttgatcactctgccagttggagagctcctgccagcaatgcccctgcccaggccttgttcaggcccaaccctttgattgtcagcatgacctcattttttttggacatgggactggtgaagggcagctgccccatgcaacggaaagcagtggtggtgccaagtttgccccagagctgctggcgagagtggggcaaggaaatgacagagctgttaacatgccactgtccactaggcagcagaagccgggactataagagctaattagcatgctgtaacaccccctctggggctttggggtcatggacacccctgcctaggtgccactgcattccccttgtctggatgccagagaccaccaggggagtggcttgcaacatgcctggtccagtcgcaagcacagcacagagcctgcttctgtgccagcacttggaacaaccggctaggtccacattcactcatgggcgggtgctcttcctatcagagccagaatgtgctgtgattccaaggaaatgtaagccttatacgcaggaaaatatgcagctacacaatgagaaaacagagctccaggtgactgggctatttaaataattttttaaaaaaattcataggccgggcgtggtggctcacgcctgtaatcccagcagtttgggaggccgaggcgggcggatcacgaggtcaggagatcgagaccatcccggctaaaacggtgaaaccccgtctctactaaaaatacaaaaaaattagccgggcgtagtggcgggcgcctgtagtcccagctacttgggaggctgaggcaggagaatggcgtgaacccgggaggcggagcttgcagtgagccgagatcccgccactgcactccagcctgggcgacagagtgagactccgtctcaaaaaaaaaaaaaaaaaaaaaaaaattcataagacattttggttccagatacattaagtaatctctgtctctctctttccccaagatcaacaaggagagaatagattttgtgcttatctcctacgtctgctttacctttgtcctaatcataaattgttcctctatctcaaatgcaacttgttctctgctgcctctaatagtgtcaatccagctcagaagacatctcctctggaaaatgactgatcacaccccaagttgatccctgcttactcatccatcaaatgttactgagtgctttttatgcctggcacggtgctaggacctgataacaaaaaaagatgaacgaggcctagtttttaccctccaagagctcacagactagcaatgagatagatgcataaatggaaaatagtaccattactgtgtgctgtgaaagaaaaatgtacatttatccaacaaacatctaatgattgcttactctgtgcatgccttatgctggtgtgaaatacaaaaatgaataagacacctttctatttctaaggtgtgtctagtgaaggagacagacaattcaatggtcccaatttaggagcatagtaagtagcaccaggttcacatgggatcccgaagcatggcacctgccagatggtagttgttgggaaagtttcccataaattttatataaaacaagaaaaaggcagggatggattccaggtagaaagagcaacttgtgtaaaggcaggatggcttgggagagcacgctggcattttagagcaacctgaagcagtgcagtacggctggtccacagaggaccaaaaggagacatgagggaaaaatctggagaggtaggcagaggccagaccacaggctctggagaggcattggtcatttcaagcaggcaagtgcctcatcagatttgcattttagaaagatcattctagtggaagtgggtggatcagcacaagtagaggcagactaggaaaaggacactatttaatagtttaattcaaattggaaatgatgagggaggaaatctgggcaatagtattggggatagagagaagggatggacttaggaggcatagaggagttttacgggctgaattatgtctctcctcaaaattcataaagtcctaaccccctgtatttggtgataaggcctccaaagaagtaattaagttaaaatgaggtcatcaggatgggccctaatccaatatgactggtgttcttataagaagaggagattagggctggcactataatcccagcactttggggggccgaggcgggtggatcacctgaggtcaggagttcgagaccagcctggccaacgtggtgaaaccctatctctactaaaaatacaaaaaattagctgggcatgttagtgggcacctgtaatcccagctacttgggaggctgaggcaggagaattgcttgaacctgggaggtggaggttgcagtgagccgagatcgcgccattgcactccagcctgggcggcaagagtgaaactccgtctcaaaaaaaaagaagaagagatcaggacaaacacacacagagggaaggccacgtgaagacacagggagaagaaaccatctacaagccaaggagagaggcctcaggagaaactaactccgctgacaccttgatctcagccttgcagcctccagaattgtgagaaaatacatttccattgtttcaaccaccagtctatggtacttttttatggcagccttagtagactaacccaaggaggaggaatcagggatgtagggagccaggcaggcggaataaagggtgactttgaggtttctgactgtggcagcctagtgtgggatgctgttgtgttccaaaagatgtgacctagggggagcagccgggttagagatgggagatggtgccttctagacagccgattggagatgtccactaagcagctgggtatgtggggttggggcttggtcaagggaagggagctgaggatgcagatattgtgatctccagagcagtcgaagcagagcagtggtcaaggttgcccagggcacatgtgtgctatgagaagaaaaggcagaggacaggaccacagggacccctatcacttatgggagaggcgaaggaaaagggcctgggcacaagacagtgaggggcattagtgagagtctcagagaacagtgtcaggggagccaagagaggctttcaaatgctggagagttcaatgtttccaagactctctctttacacgtgcacgcgcgtgcacatgcgcacacacacacttttgggctgttgctttgtaatgatttccctcattattttgtgtgtgatattcttcaagttttggagtcagaaccagagtactgtccatttgcttctccagaggcagcagaatgcttttcagctccacatccctgccaggtaatgcctgccctctaacaggtgggccacttcagctacattttccctctcactcggaggtgtctctgctgggttgtcttgattttccctccagggtcatccttagctgtccctttagtgatgatgcatggctagaagagagaaactccatggctctgccccagggtgtttgaggtggggctgcttttttgttttttttttaagacagcatcttgctttgttgcccatcgtggagtatactggcacgatcatggctcactgcagcttcaagccccactcaagtgatcctcccaccccagcctcctgagcagctgggactatatgcccagctaattttttgtttgttttcctgttactagatggattctttttttttttttttaaattttgtagagacgaagtctcagtatgctgctcaggctagtttcgaactgctaggctcaagaattcctcctaccagccaggcgcagtggctcatgcctgtaattccagtacttggggaagtcgaggtgggtggatcacttgaggttgggagttcgagaccagcttggccaatatggagaaaccccgtctctactaaaaatacaaaaattagctgagtgcggtggtgcacctataatcccatctacttgggatgctgaggcaggagaatcgcttgaacccaggaggcagaggttacagttacagagccaagattgtaccattgcactccagcctggacaacagagcgagactcagtctcaaaaaaaaaaaattcctcctaccttggcctcccaaaatattgggattataagcttgagccactgtgcccagctgaagctgctcttcttaaggctcattgaggggtagggcagaatccctgtgcctttggttggaattacagaaaccactgctcccactgccctcagcttccccagacccgggaagtgaccattcagcactggcactgcatagattccagggcatcaccctttacttattctggggaagggaaagcacatagacccgcctctcatttatccctcactgcaacccagtgagacacacattgaagtaaagtgatgttctcaaagccacatgattaattaggaacccaggaattgaacctagctgtttgactctaaaggtctttccactgtgaccttgccctctcctgctgccttattttcaccactcagttctctctgctccatctttactcaatggttgctccacctgcccatacgcaaacactaggaggatgctgctgaaggcctggagcaccttcactgcaaacatagtcagtcagcagcagcagtaagccaggcaaccagtcatgaaactttcccatccaaggtacttctgggggctggaggaaacaataaggagagagagagagaataagagagagagagagcaacgtttaggctttaacgagaatcttgcctagttggcaatctgctggatgaaatgtcagagatttttgctaacccactcacctttgacagcaatagcttctgagtattgggatctccagagagaggggcagttgaagcagagcacattcagtgtctttttggagtctcaaaaaaattgcaaggtgggaagtgctggccctctcctgctcccactgaaatgaagctggaagagaattgcacacccagctgggcatctcaggagacctaggcaagttcagtcttgagtgacaaactcagtggtcttgtcacttcagctcatggccttcctgaggtcccccagcatgagtctcctccacgagagacctgaccaatggtgacccagcctctgtttgagcgtcatctaccagcagagatggggactcctggccccaaggctcccagcatagcctgacactttgagctattccagtcctttcttattttgagattaaatctccctccctacagctcccttccacagtcaggaggaaagtcctgctgaatgcaggccctgaagcaagggccagggaagcttttcctcgtcaccctcccaaagtcaagacttggaaaggcagctctgagcccctggcttggctggctggccggagcaggcagccactgtgcctgcagggaattctgcacagccagtttcctcatacctgagccgtctacagctgcacgcaccactcccggcctcaacacactatttaaggccaatacacgggagctggttgtgagtcaccaaggaaggcagcggcagctccactcagccagtacccagatacgctgggaaccttccccagccatggcttccctggggcagatcctcttctggaggtagtatatactcttctctctatccttatgggtgaagggaacagcagtgaggtcttttggggatgctgagcactgctgggctgtcccataggaccccacctgtaattttatctgatccagcattgggccagcgggagcctggccagacaagagcctaactggatttgacttaacatcccacctcagctgctcaaggcacctgttcagggttagggaggtttttggttggtggcctgccatggagggctggcgcttgctgggcagcttggactgaggggagtacgtgccaagctgggcattcccctgagatgtcaaggctgtgagcaccatggggacactgagcaggctggtgtgggttgcatggtgggatggcagggaatccatgactgcgacagtggaggggatgcaggaggaccctttatgcagcccccagggggacggaggagaatgtgctttcattctctgtgggtgtgatttcttgctactcttgagcaattcacaccaacacccctccccaggcccccccagctcaaaggttgggtccctagttttcctaggagctccttggagaggagaacttgctgctgctgctgctgctgctgctgctgctgaactccccagagaggaagaaggaagcaagttccctcccctaccttttgcttctcccctgagctacattctagttgcctctttttccctcagaacagcatttaccctcctggaaggaaagagatggaaagtgcagggttttcttgaaatgattgattcagtgtcagtcacaactcaggacagtgtttagggaggctgatacttgttggttctagaggttgtttgaaggaccagtcctccaatttgtttctttttcccacaaaaggaagaaaagaagagagggaaggagagaggaaaggaatcctcaggtcaacagtgaaaagtttgtgaagagactacgagagtaatgttacttcccagaggcagcctagaaagttcttttccttgaaacaaaatatcagctcccctgactcgactcacgtttatctgaaatcacctgccgggtagcagaggtgaaggactctgcagggctggtgggggtggctgcagcggcacttctgcccccacccctgtgcctggctacagcactgtgctccaggagaagcagtgggtggcaggggcttccctctagacccttctgccctgagaggatgtccctaagaagcacctatgtcagaggagctagcattttgtgagtgactccttccctgccctgcactaggtgtcttagagcagcgtgtccaccactgccttgtgaagactcgttatcacctcagagaagttaaggccagatgactgtgaaactgtgcatgaggggatcttgctctgaaatcccaagctctctccccctgccacccttgcccctgctcctgccagtcccagttctccatgcccaccattcctccagccttgatcccaaggacatgaaacactcctcctgcaacaagtggctccattgttcagaggtcagatgggatgtgtgggctctctcgtaatgctttgcatccagtctgactggttttgctggaggattagcaggaggtgggtgttcaaaattcgtatcccctacccttcagaaacccactggaatcaacagagactcctcttgttggctcctgcatgccttgttggctattcatgctctgcagtttcagaagcagcgactgtccatgagggtggcagatcctttgtgcaagggacctccaggaagagggccaatgagcagcttcagtggggagcaggatcatgaaagctcatctcagggatgcaggtggagcctgcctggggtaactcttgaccctaataaccctcttcctttgtcataatggccttaattcataaaaatacctctcctggaggtgatcatgacagtggtgatgttggaacgctcatgaaagggcctgccatcctctgcagacccagtgagttattctcctaagtattcataatttccagagagcctaattccttcagatctcactctcagcatgcatgctgctcagggatggaatgctgatgtgcagattttaccgtgcctggcctctgtgcacatttaggaactgtgtgactagaaccctcctcccctctccccatcatggctgttgacagcagcagcattcgctcatgaaacatttgcagaatgcttgctaggaggacaggggtagaaaacccttgctctgagggggttaagttccagtcaacaatattaactgagcactcactgtgtcctgaatattgcactagacaatggggcaaaagtgactaagatgctgtcaaggtcataacctaatggaggagaaagactcccacataacaactctaacgcgccacccttaagtcctcagacaataagcacaggttgcaaggggagcacttccctcacccaaggcttttggggagggtttctgagccagagaatgggtgggctgtgtcttgaaaaatgagttcatatgacccaggtgaagaagggtggaaaaggctgtctaggtagaggaaacagaattaaatcaaatacaataaaactcatgaatgagcatggtgtgttggaaagctacacactactgtgtattatcatcataacatgaagtttgaggcaggaaatgctgggagatgaggctgagaggtcacaccaggtcacactgggccttcgatagactcagaactgggatttgtggtgatgaggagcccttacaggcacaggccatattggtgtccaactttcagcttccctgagcctataaaatctgagccttcagagccttcagaggggggtcaaggtggttttcgtctcaggtgggcagcaagcctggaggccagaagaagagttgggaaacagttgtggtcagagtatacaggatgacagggacctggcatagatgagagtgagagtaaagaactacaggaggaaaatggattcaggaaacactggacttaaaactggtgatatttgatcaatgattggaggggcaggtaggatgctgcagaataagagtaggtgaggcaaggggcagatcctggaatgactaccatgtttctggattgggtgcagtgagttggggacaaggaagagagaggagagctagttaatgtgttgagcttgagattcccctgggaccttcagatggggatgctccctgggcagcagagggcatgaggctaaaactaggagaggtcaggcctggggatagacatctagtgtcaatagctcaagggcaaggaatagtcatagggggtggctcctacggagagcatgtggagggagggaagcaaggggccaggacggatggctgaagaacaccaacattcaagggtgggcagaggaagaggggggtcagggaaagagctgagaataaatggcaagacaggtagcaagaggccaggatagagattaatggatgtcaacagagcagagtttcatggaacacacaaggctagtgatccataaacctttaccctgtttcatctgaaatcactagtgacaatggcattgataaaaacatgtcacaggaaggaagctactgagtagagaaggagcagggatctttctaccataggaaggtggatgaagtagagaatgagggatcctgggacaaggaggctcagggagtttgctttggaattttggtttcccatttctcctaagtttgcaagctggtgcctggctcagacatctcagaccttgaaggtcagagaaaacagtgcctcgcaacaccatggaagcttgtctggtaagaaaatcttgcttgagcctgggctgaggagatctcagcacaggccgtatttgtgtccaactttcagcttccctgagcctataaaatctgagccttcagaaccttctgagtccatcccgtgaacaggacaggaatctgcaaaatgagataaattgtacattggaagaaagacttaaataggtggcacctgtgttcctgctcctattgagggtagatgattttctgagtgttatgcttttcccccatctccacctgttgcaatgctagtcatttctttcaatattcagctcaaatgccacctccactttgaagtcttacaggatctttctagttgccatcaattgcccatcttatgttcatagtcagcatcaacagatatgaatatctgttcctgtgcctgtttccctcaccagggttcgctccttgagggttgggactctgtcatgcaccttgttgtagggaggcaatgtagcactatggctgtgcatctggattcaactccttgtgccaccatgaacatttaccctccaagagcttcaattgccctatctatgaaatggggcagataatagtacctaactcctagggctgtatgaatgatatgtaataattatgttcctggcacatcctaagaactccataaatgttagctattgctatactcattacttgcaactccctctacaatccatggttcttggttggctctccataaaaatttgttaacttcaatttcacgactccactggcacttctgatcctgaaacagatgttgcagtgagggtatactttggattaattgccccagggatctcttaaattcagttagctctaaaagaactctggagaatactcatagagttctccagattcttattctacaaaaaaaaaaaaaatgataataataaagtccaccacaccttttgttgtcgtgaatctgagacacaatccttctctaaacctgaggatgctaggatttagacttattaaatgtctgactcttttaatgccagtatagagcattaaaagttggtggtgaagagcttcagggtgggtgagatgcatctgggaggtcctagtgtgtacaagctcagcgtctagatctctgatgaggcactgctgacaccaagaacaacaacctcaggggccaattggagcgatgcgactatgaccaagcacgtggtaatgcttaactagctaaactgtctcatagtcctaatcatctccatttcacagatgcaaatgttgaggcaagttaccttgctcaatatctcctaggcagccaatggcaggaaccaacatgttactacctagtcctctatacctacttttattgaaaaattacctttctaatcagctgtgcttattctcttgctagttaagcagaacccttcatcactggcaaaaacacacctcctcagtgactgtcatggcagaagaattcttagctggccacgggaagagctgctcccagaattagctgcagcctgtggattgttggtctgtgttgcttcaggcagctgctctagatgaatgagtgcaggagtaaggagttactgaaactcagtaagaattatatgctggccaggcatggtggctcacacctgtaatctcagcactttggaaggctgaggcaggcggatcacttgagtccaggagttcaggagtttgagacaagcctgggtaacatggtgaaaccccatctctacaaaaaatacaaaaatcaacaaggtgtggtggtacatgcctgtagtcccagctactcgggactgaggtgggagaattgcttgagcctgtgaggttaaggttgcagtgagccatcattggtgttactgcactccagcctgggtaatagagcgagacccccctctctctctctctctctctatatatatatataaaaatatatatatgacatgtatatatacatatacatatacatacatatacatacatacatatacatgtacatatacatatatacatatatatacatatacaggacacgtatatatatacgtgtatatatacgcatatatatatgctttcagagcttaaaagttcagaaagtcagtacacctcattttatcaatgggataatcagaataaagtaggcagcttgtccaagggccatacattaaaaatggtagaacagggttttttcttttttcttttttgtgagacagagtctcgctctgttgcccaggctggagtacagtggtgtgatctcggctcactgcaactttcacctcccatgttcaagtgattctcctgcctcagcctcctgagtagctgggactacaggtgcatgccaccacacccagctaattttttgtatttttagtagagacgaggtttcaccgtgttagccaggatggtctccatctcctgacctcatgatccacccacctcggcctcccaaagtgctgggattacaggcgtgagccaccgcaactggccaaaacagggttttttcaagatcctatattgcccagggaccctagctaagaactatgttggaccctagcagaccacattttacccaagcagcaagaatccacaaatctgagagaccaagacttcatacatacttacttttgccatatgaaagtgtggaaataatgtggaaactggagttagtctgatctgtggatgtattccagctctccacttcctagctgggtgacctcaaggaagttacttaatctctctgtgtcttcattaccttatcagtaaattgggcattaataatagtagcacctaggtcacagggctgttataaagactaagtgagttaataaagtaaagagctcagagcagcgtcttgtatatagttagcactttatgtgttaattagtctcaaattattccctccgatgtttttgcagaaaaacagagacttgcagggagggagaggaatgacaagtccaacaatagcagctggacttaaggacattttgtgtctggaatcttttgggatttcaatggactcagacatcgtctttctagtccttgttctgtgaggtgcgggaaatcctctgccacctgaagtggtgaactagatgaaccctaaggccttccccatccaaactcgatgttcaaagtatggtcttccaaccagcagcatccacatcacctgggaactattagagatgcaaattttcattccccccatcctgcaaagaatcagaaattctgggggcagggcctggtaatctgtggcgtaacaagacctccaggtgattctctgtattagcagccgctctgtgctccctgattcctccagaaaagcacaaggatttaatccagatagatataaatttcacctgggatcatttatcattccacattcttctttaagaaatgtgctaaagagccacagatgggtcttgatgaaaacaaaggaaaagccatgaagtttctacaggtaagaaacccaggctacatttctctctgtgtgcgcttttcacaatcccaaaccatctgcctgcaatgcttctgatttcctatcacatcacttcagatgtgttcctgctgctgccagcacagcggtcatgggaaagagggcaggcagtttttcctctttctttttctgcaatttaaaatgaaaaatttcatagataaaaaccatgaaagatttgagagacagacagtgcatccataaaatttaggaattgtctcttgtagctccctgcctcacctcctcattgtgttttctcagcacctccacccccagaatggccatttcatacctctcttccctcttcaatcctcttacaacccccatcccttctccccaccccagcctcagatgattatcttgctctacccttcactgagaaaagagaaaccagcagacaggtactccttcatcttttcacatccaaaactacccgctaccctcactgggtgccctttttctttgcctcccctcctggtaccagaggatttgctgagctcctatcaaaggtcagcccctctgtgctctggatccatctcatctcccagctcgcaaacacctcctccagcagacatcatcaatctctcctctgcacctctattatccccatcagcatgcaacccgtgtatcaggattttctgtcttaaaagaaaactctctctcagccccacaacctctccagctacccaccccatctctctttttttccttttcagcacttgtcgctagtgttgtctggagtgagtgttcatcctggtttcgtggcattgtgaaaggagagtgaggtagaggtttcaagcacaggctggagccaggttgtctgggtccatccaactctgccactttctaactgtgagactttgggccatctagttatcctctctgtgcctggattcctcatctgtaaaatggggataatattagaatctacatcataagattgttataagaattacatgagctaagacataaagcgcttagcagcatattcttatttccttttcaacttactctagatggattttgtccccactataccaagatactgttccggtcagtgcctctaatcacctccacattgctgagtctaatgtttacacctctgttcttatcttgtcttcacttcagcattcaacacagatgtcctcaccacctccctgaagctctttcttctcttggtttccatgacactacactcccctgatttgctgctctccccctcactcctgacatcaagctggtctctcagcctccgtttctctatacccggttgctggtggcagcttttctcctctgctgccccaactcgaagccaccaagctctgtagtcaggtacaaggacataaccctttcatccatttcctatatttgatgattgaccctacttttgccaaaatacctaagtgttcaggaacagaatataacagtatgagaacaattatcctttaaagtggtgggcagaagcttcttaaagtcttacgaggcatgatagggtaagtcatgtaatagcaggtactgtgtgggagggaatttcttttcacatccagaggagccccaggcataagcccttaaagcttgagataaggtttccagacaggtcctggtggaaagccctgaggcaggagagagttagatgagggaggcaagaagctgagatttgatttcacttctgctcatccaaggaaactgccttctagcctcttccttctttcttccatttgttaaagagagaccaaatattaatgattctctgcagccaagagagaagcagccagatttgatgggaaagtcatggtgtcattttattggccttaggccaggggatctttgtctaatgaccataatgtagggtcatagcaatttagcaaaacaagccaagtttttaagctccccctcaccccatcccacagtggtcaccttcaccttggggccagctctgtgggtgcttccccataaaggggctatatctcttgggtacttactcatgccaggtcctccagaaggacagtatgcaaggaatattaggggcaggcttgcaaattgctgctggctcagaacctaggaacaaggctgcatttgggagtgggatgcatgcagggaaagggggagatcaggattccagaatttcccctacacagagggattcccccacagagccctggagagaaagccataatcccgagttactgtgcctttctggtcggcagctctgtgattctgctgcactgggactccctcccgcaggccaggctttgtctaaaggcctggacagaggaattctcttgggctatgacagtctcattctccatcaagaggctgctgaggggcttttgggacagtgacctaagcaagcccaggaagacattttcccgtggacacagctttataagttggaccttattccctaagttaaccctcaagagtatattctatattgtagttgtgcatttatgataggattatttttctactattttcctttcccattataaatgtatagaattgtctgggcagggtggtttatacttataatccaaacactttgggaggccaaggggggcagatcacttcagtccaggaattcgagaccagattaggcaacatgcagaaaccttgtctctacctgctgcaccccaccaaacaaaaaacaaaccaaaaaaattagcctggcgtagtagctgggattacgcctatagtcccagctactcaggaggctgacatgggaggttggaggttgcactgagctgagatcacaccactgcactccagcctgggtgacaaagtgagatcctgcctcaaaataaatagatgtgcagaacatctaaaacactggaatccaacagacatctagggccttgctggaaaagctaaccatcatttgtaaatagtgttgctgtaagatcctgtacagaacttcaaataaccaacttaaacacaaactttggaaaagagccactgggtggtgggaatacctgaagatttggggatctatgtaggcgggctacatctgggtaaggaggcaaagaagatattcaaagggtaatgtttacctgtcccttaggtcttggagtccacctagctcaatgaggaggtcagaggaacttaatactgaagtcctggctggaggtcatcttatccttgacactactctgcaatcttggaaagaatggggagggggtgcactgggatttttctcagaattctgttttccaggctggaaggcagcagtgagatcatggctcattgtagccttgacctcccaggctccagtaacctcccaactcagcctcccaggtagctgggattacaggtactcaccaccatgcctagccactttatttattatagagacagagtctccctatgttgtccaggttggtctcaaaaactcctgggctcaagcaatcctcccacttcagcctcccaaattactggaattacaggcataagccactgtgactggcccatagttctatccttataaatgactcttttcttttttgtttttgcccttttaaagcccaactgtgaatagttttttacatagttattaatacaatgtgtgtgcttttatgctctgctttttccatgaaaactttttgcattaaaacaaaattttaaagcaattttacagttaaaagaatccctgcaggctgggcgtggtggctcaaacctgtaatcctaggactttgggaggccgaggtgggcggatcacaaggtcaagagatggagaccatcttggccaacatggtgaaaccccatctctactaaaaatacaaaaattagccaggcgtggtggcacatgcctgtagtcccagctactggggaggctgaggcaggagaatcgcttgaacccagaaggcagaggttgcagtgagccacgactgcaccactgtacttcagcctgagcaacagagcaagactccatctcaaaaaaaaaaaaaaaaaaaattccttgtggccgggcacagtggcccacgcctgtaatcccagcactttgggaggctgaggtgggtggatcgcttgaggtcaggagttcgagaccagtctggccaacatggcgaaaccccatctctactaaaaatataaaaatttgctggacgtggtggtgggcatctgcaatcccagctactcgggaggctgaggcaggagaattgcttgagcctgtgaggcagagtttgcagtgagcagagatcgcgccattgcactccaacctgggagacagagtgagactcagtctcaaaaagaaagaaaaagaaaaatggtaatttcaaaggatttgacctaatatatattcttctaggacattcattatccatattagcatattaaaggatttcaaaaatcctatagacttaagtctgtttaattgtgattcacccaacattatgaaaatgtaatccctttaaaaataatacttgttaatgtacattaggacaccttcaagaaactaggcactggggtaattacaaaagaatagaagccacgaggagacaaaactatgtgaatgtgggagcccaggagcagcatctagggccttctcccaccttccaaactggatgcagatgctggctgagcagatgcccaggaaccaaagggcaggctggtatttttactttccaggaatgccctcccatatttgatatccaaagtcatatttttcaggtcttccccttctacagcagtgctttcttgactaaccttgccccacattggctttttttgtaactgacctatgctcttgcctctctcataaaagtatagggaggattcatgaggtgatatgaatggatcaccccgtatttctcaaatgacaggtattaaataaacgtgggtattgttttgactgccgtctcattgttataattttaattactttatctttcagggtattattctcatcttagtttataggtgttcctttcatttgctgacaactaccaggtgggtggtgctgatgtggatgcaggaggcgatgcagccctgggttgcttatgcctctacagagaatgtggatgctgaaggcacacgtagccagaatttgaattaatttttctgcagccactggagccaaatgtctaagacagggaatggaaatgttggatgggggtagaatcagagtacagtgaaacaatggccggccaggactaaatccccagtgcttctgcctttttttcttgttttactccactgtcccactatctggaatccttcccatgagagatcctttaacaggcttgtctgtcattcacatataacacacaagcctttaatagggctgtctgtcattcacatgttagtatgaccaattctctagagagtgagtaggcattttgacatcactgtgcagatctgatctggttatctagcagttgttagatgtgagtagaaataatcatgatacttcagggaagtggaagatgagagttgaaaggtagggtggggcttccctatgatagcacacgttaatttaattaaagtggttaactgtagctgagtaaggttgaagtgacattaaatggggccccaacagttttgtgtccctgcagtagaaggcagtgcccagagtgagtgtacctacaggagaaattcttggactttcaggggcattggtacaaacacccagttaccagcaggcatacaaacaagccttttgctttctcatgatggaaatggaagtacagcccttgacttagactcactgaagaagcaaacgctggcaaaccttgaacaagccatgccatctttcagatccttacctctcattttgttaccagtggagggtataaatatgttactggtggagggtggccaggttctcggagtcttgaacaaagaattgaagaaaatgcacaaagcaaggaaagaatgaagcaacaaaagcagagatgtattgaaaatgaaataatgctccacagggtgggagcaggccaagcaaaggggcgcaagagccctgttacagagttttcaggggcttaaataccctctagaggtttccattggttacttggtgtacgccctatgtaaatgaagaggatgaagtaaaggttcaaagtcgtttactcagtatactccctaagtaaatggagagaatatttactattatagctgaagtgtttccatttgacttagttctaggaagtcagcatgaatgggccctatgttccctgtctccagaccctattctcctgcctcaaatttgtcctctgtaaaagtcaaaaatatcctaataatatatcctgagttctctgagagcaatgagaagggggaggggtgtgaacattgctacttctctttaggtgcatgataaatctgttttctcatatttctacattgatattttctagtagacaaattactgggtcaatgaaatgcttgacttttatgggcttagcgaataagtacttacagtttcactaatactgaccccaacatattgtacttatcttaataaacatgttgtctaaaagtaaacgatgattttctgaggcagaaaaataggtgaactgcaagagaatctttttaatatgggtagaggctcctgctagcttcacaattttctacccttaaggcaaataaagttgtaaagaagtgagctgcaagatggtggctttcattagcattccccaaaggtgtcaaactgtgaaggaagtattctgtttatccgaaaattctaggggctccaggtgctgctggcttgagctctctggaactgaggctgctgtctaatcattgcctggggtagtttgtgagccatgtattgacttatgaagaacatgcttgctcacttaaatgaagaaaaacaagttatctataatttatagcatatattcacttgggtactagctctttctatgagagctcttctgaaaatgcaaaccactaacccaggaaagtatttaagttaccagctttatgggagcattaaatggagagatgcctgtttgcccaacatctaaaagagttagactgtactcttaaaaaaaaaaaggcagagttttcttttttaacatatgttttccttgtttgttttataagaataatattggattagtgtggaaaatttggaaaatacaaaaaagcacaaaggaaaaaaatatctatcggtcctaacctagagataaccactatttatatgtccttccagtcttttttttccgtctctctctctctctctctctatatatatatatatgtatttaatacatagtaaaatactgtacatattattttggaaatgactttctacttattggtcttataagtatttctcaaataaatcttcttctataatatgattttttaacaaatgcatagtattgccgctaatgatgaaccttaattcactcactaagttccctattgttggacatttaattgccttcaattatttgccaaaattattacatttattttattttattattatcatcaagacacagtctcactttgttgcctcacctggagtgcagtggtactatcatagctcactgcagcctcaacttcccaggatcaagtgatcctcccacttcacccttccaagtagctgggactatgggtgcatgccaatatgcctgactaaattttttaaatgtttgtagaggcaaggccttcctatgttgcccaaattggtctcaaacccctgggctcaggcaatcctccctactcatcctcctaaagtgctaggattacaggtgtgagccaccgcacccaatcctattacattaattttagtcaacactatagataaccttggaaatgtatcctgttgattctgtagaataaattcctagaagtagaattactggatcaaagttggctgtgcatatcataagccttctgatatatgtggccaaatttttcccctctccccacactaaagttggtaccaacttatgctcctaccaaccatttatatgctttaaagtaataactttcactaaagcctttttccagaaccagcactaaccctgccaacatattgaaaaagaaaatgacaaaattttaatttaacattaccatcttcttcaatatttgaggttttctttctcgtttcttagcctcccttctcttttttccccacagcttaattgaggtataattgacaaaaattctatatatttaaggcatacaatgtgatgatttgatgtacatatacattgtgaaacgattaccacaatcaggtcagttaacacatatactttacctcagttatttgtgtgtgtttgcagtgaagacacttaagacctgctctgttagcaaatttcaagtgttcaatacaatattattattattattattattattattattattattattttgagacggagtcttgctctctctccaggctggagtacagtggtgtgatctctgctcactgcaacctctgtctcccaggttgaaacaattctcctgtctcagcctccctagtagctggtactacaggcgccctccatcatgcctggctgatttttgtatttttactagagatagggtttcactatattaggctggtctcgaactcctgacctcaggtgatccacccacctcggcctcccaaagtgctgggattataggcatgagccaccgtgcccggcctacaaaacaatattattaactacaggccccatgctgtatattagatccccagaacttattactcttatacctgaaaatttgtaccctttgactaacacctctccattttccctaacccctatcccctggcaaccatcattcatctctctgcttcaatgagtgtaactttttaagattccatatgtaaatgagatgatatagtatttgtctttttgtggctgatatatttcacttagcataatgacctccaggttccatctgtgttaccacaaatggcaggatttcctgcctctcataggctgaataatatttcattgtaaatatgggacacaatttctttgtcaactcatgtattgatagacacagtttgtttccatatgatggctcttgtgaataatgctgcaatgaacgtgggggtacagatatgccttctagacattgattacatttcctttggatatatacccagtagtgagattgacagatcatatggtagttccatttttaattttttgaagaaccttcatactgttttccacaataactataccaatttacattcccaccaatagtatacaaatgttcctttttctctgcatccgcaccaacatttttatcacttgtctttttgataagggccatcctaacaggtgtgaggtgatatctcactgtggttttgatttatagttccctgatgattagtgatgttgaccaccttttcatttgcccgttagccatttacgtatcttctttgaaaaaaatgtgtattcaagtctttgcccatttttaaaacttgggttatttggtttcttgctattgagttatatgagttccttatatattttgacattaactccttatcagatatatggtttgcaaatattttcttctattctttaggttgcctgttcattttgttgattgttttcttcgctgtgcagaagatttctagtttgaagtattccacttatttatttttgctatttgcttgtgtttttggtgtcatatccaaaaagtcattgccaaaaccaacatcaaagggagcttttttcctatattttcttctggtagtttgagttttgagtcttatatttagtcttcaatacattttgagttaatgtttgtgtgtggtgtaagataaagatccaatttctttcttttgcatgtggactctggttttcccagtaccatttattgctgctgctgttggatggaatgttctatgtctattaggtccattttgtctgtagaattattgaggcctaccatttctttatggattttctgtctaaacgatctgtccattattgaaagtaggatattaaagtcccctactattttggttttgctgtcttttctcccttcagttctgttaatatttgctttatatatttagatgctccaagttggatgcatagatatatttacaattgttatacccttttgatgaattgacccctttgtcattatctttgttactatctttgtcttcacaacaaattttgactgaaagtctactttgtctgatataagcatagccattgctcttctcttttggttaccatttgcgtggaatatctttccatttcttcactttcattctgtgtcctaagggtaaaatgaatttcttgtagacagcatattgtaggatctttttaaaaaatctgttcaatcattctgtcttttgactgaaaaatgtaatccatttacatttaaagtagttattgataggtaagtacagtcatccctaagtatctgtggggaattggttccaggaaccactcccccaccccaaaatgcctgataaaaaaatccacagatgctcaagttccttatataaaatggtgtagtatttgcatataatttatgcacatctcccatatactttgaatcatctctagattacttaaaatacctaatacaatgtaaatgctatgtaaatagttgttatgctgtattgttattcttatttccattgttattgctgtgttgttattttgttttcttcctaatatattaatatttgatacatagttggttgaatccacagatgtagaacccatgaatactaatggctaactgtacttactatttcattttgttaattgttttctaagtggtctgaagtttctttccttctgtctttctgtcttcctttgtgatttgattacttttttgtagtgttattctttgattcatttctctttatcttttgtctactagaattttttttgagttatcctgaggcttacgtaaaatacctataacagtctattttaagctaacaacttaacttcaattgcacatgaaactctacaatcttacccccaacacacacatcttatgatattaatgtcacactttacatttttaatagtgtatacccattaagaaattatagctatagttatatttaatactgttgtcttttaacttttatactacagtttaatgtgattcctgtaccacagttacagaactagagtattctcaatttgactgtatatttactttttccagtgaattttatacttttatatgctttcatattgttacttagcatcctttaatttcaacttgagaaaccttctttagcatctctcataaggcaggtctagtagtaatgaaatctctcagcttttgtttgtgaatatcttcatctgtccttcatttctgaaggacagttttgttaggtttagtattttgggttgacagttgttttcttccagcactttgaatatatcatcccatttcttcctggcctgtaagacttctgctgaaaaatccaccagtagcttcacaaagtttcccttatatgtgacaagcctgttttttcctgctgctttcaaaattctgtctttgtctttggattttattttattataatgtgtcttggagtaatattctttggggacgctgcttaaaatcttttgagctctgtaaatttggatgtgtatatatatatatctatatatctcctaagaattgggaaattttcaactactacatttccctcccaccccacagggtcttgcttggttgcccaagctggagaacaggagttcagtggcatgatcatagctcactacagcctcaaactctgggttcaagagatccttccaccttagcctctgaagtagctaggactacaggtgtttttcaccatgcccagcttattttttattttatttatttatttattgagatggagtttcactcttgttgcccaagctaaagtgcaatggcgtgtatcagctcaccacaccttctgccacctgggttcaagcgattctcctgcctcagcctcccgagtagctgggattacaggcatgtgccaccatgcccggctaattttgtacttttagtagagacagggtttctccatgttggtcaggctggtctcaaactcccgacctcaggtgatctgcccaccttggcctcccaaagtgctgggattacagcaaccagtctgttttttattttttatagaaatagtgtctggctatctggctatgttgcccaggctggtctcaaactcctggctgcaggcaatcctcccaccttggcctccgaaagtgctgagattacaggcataggccaccacgcctggcctattacatctttaaatagtatgttttcccctttctctcttgcttctccttctaagactcccataatggatatatttgatcacttgatggtggcccaaaagtcttctgtgctttctttactatttttcattgtttttctttttgttcctctaaatgactgattgcaaatgacctgtatttaagttcattgattttttttcttgtatgatcaagtctgctgttgaagccctctatcaaatgtttctgttctgtgattgcattcttcagctccaaaatttctgtttagttcttctttatggtttttgtttctttattaaactcttcttttttatgtactgtttttctgatttttgtttaatggtctgtctgtgttcttttgtgcatctcattgagcttctttaagatgattattttaaattcttgtcaggcaattaatagactttcatattttgggttggttgctgaaattttactagtttctttggtggtgtcacgtttgcctgatccttcttaatgtgcatagacttgcattagtgtttatatattgtaaggaccaaacatctgttttagactttatagattggttttggcaggtaaggacatttgcctgtcagttccctggagtgatggtattgcctccaggattgtagttaagcaaggttggagtggggttacataactgctcctgagtctgcagcagggtccactgttggtgggcccattaccagtggcttgggcagatatggatcctgtctggaggagtcctagattttggtcagtagggctgatactgaaccaaaggtctgcctcaggatctgcagttgggtctgtggacagtgggcttgttatcaggtgtgtgtatggctatggctcctgccaagtctctgtgggaggatacctgctgagttagtaagcaggaaatactggctctggtctgtggctaaaaggggctgaaaccaagtcacagagttccttcagcatccacaattgagaccaaggttttcaggcctacctctgcagacatggatgggcatggctcctgccaggttcttgggtggttaggactgctgaggccacagcctgaaaaatgctgaaggtaggtcatagggctgcttcacaatcctcagttggactgagattggcaagtctgtcttcgtgggcacagacagctatgtctcccatcaagtcctgagtgaacaggactgttccataagcacagcagagagggactagcactgggtcataggctgatctgcagtccaaagatgggaacaagatcaatgggcctgttacctgaggcacttgtgtgtggtgtgtgactcctcctgggctccttagccgatggttctggtggcaggaccaagaccaaatggggttgtagctgaatccacagaggatgaagctatttctggatctgtagcttgtggtgggtgagtctgccaccaaggcatgagcctaccttggtcttgggcttcactggggttttgcaacctcctacgtggattccaaggctcccacaaaggcactggtatccaccagtggttgccaaattaacattgctgtgggggaataggagtgggggatctcctatcccattttactgatgtccctcttcttagctgccttcctcttaatttaccacccaactctacttccagtaaggtaactaatacattcatttacctagctatcgataactaatgagtgaaatgttatactaaatattttaatcaggaacaaaaacaaagaaataacttccttgttctaaagtttcattttattatcaagctaaagatgagagttattttggggtgaagaaagtccacctctgcagggcttcagatcgggtaaagcaggtcatctgttcctcttgttcctgatgctgacttttgccaagtctccctttcgtggaacgacagggaaaaacagttaaatactcacagacttttctttctctacccaacttctcatgaaaatcttggcaccttttgctaaatctccacattctccaactcacaattacgagttcaatggagtaaatcatgcagagaaaactgaaaaggaaatgagagaaagggcagaggatagtggacctgcaggtgcgagacaagaaaataggcagcagggtaggcacagagggagaagagacgaggaagtgaacttcagagagagttttgaggaaattctaggaaagggaaagtttgggggaactgataagaagggtagaagttggtaatgagggtctttttaagaggaagttttgctatgcgttatccatgtaatgcctttgatatttttctagatattcattggtttcacctaaacttttccgccaggctgatattttgtttaccgtgacactgccaaaacctagaccacagacatctggactttatatgggttataataacattgtatctctggagttagaaaactattttttacttatatataataattaagagcagatttctaaatgtgtgtttatatttagttaattgtaattgttcacataaaacgacctaaaattattcgcataaaacctacccaaaagtataatttaaggagtcattaccctgaaataaaaatacgaactgctttcaatggcctgaaggatcttgggggaaaaaatgggctgccatgcagctgggctgtgtcatggacatattttggtatagtagtagaatatgtcccaaaatcagatgagctcagtttagcatttatcagatgcctaggatgagtcaggcatgatgtctgacacttagagaaataaatgtgattggtgaattgattcagcatgaccagtagttataatcaaaggaataatttctttttatatctgaccttttaaagtgcacatatagaaatacatgatgaaacttctgaagcctctgatgaaaacctggtttcaccttcaattgcctgatattgcctcagtcccttattccccaaaagtctacttcacacatgactctcactgctcagttccctctcccggttattcctattggtgaggactccacatagttctaggacatctgccctgctggaagggtacacattccttgcttcataaaagagtggtgactctcgcagctctctgtgttccctctctctgtctctgtctgtccgtctctctccttctctctctcgctctctgatctgttctagatcatattgaatttctcaagtatgatttaaattctaatccatggtgttccccaccttaccccatcaagaacacattacaagctcttcaagttaagctttgtatttgtgtgttagagagggggaggaggatgtttacatagcacagaagaaaaaaaaatccccgaagaaatatcttcccaaatcttttcctaccctgggcccttttaatacccttcatctgagtgaggcagctaagcattatggaaataattgtcaaagtgagtgaagtgggtaagaattatggaaatgattgtcaaagatcccccctttttttagtttttttcttttctttttttcattttataatttcttttattttttattttttgttttgttctttaaagattccctttttaaactctgcatagtgatgtggcacctcactttggtatgcagcatctattttatcttggaacctcagttgaaactttaaatgtaacatcctgttacacaaaaatgaaaagatatggtccctgttcttgagaaacttagaggagactaaaggagacacaaatgtgtgaccagataatttcaatacaatgtaacacatttgtgttagagcaatgtatctggtataatgaggacacagagacagtttctgatgcatatggctagtagtttccctgaaaaattatctggagggaagctatacactaaagaaggaggagtctgtgtatctcacaaatgcactgacaggatcctgtatgtcattggggacttcatgctattgctttgtcccctagttcctcaagtgcctgaaggaacaataatgaaattataggttcttggtaatactgttaaattggtaaagtgggtaggaaaaagctccttttttttttttttttttttttttgagacaaggtcttgctctgttacccaggctggagtgcagtggcatgatctagctcactgcaacctctgcctcctgggctcaagcaatcctcacacctcagcctcccgagtagctgggactgcaggtgcgcaccaccacacctaactaatttttgtattttttgtagaggcagggtttcaccttgttgctgaggcagggtttcaccttgttgcccaggctggtcttgaactcctggactcaagcaatccacctgccttggcctcctaaagtgctgggattacaggcatgagccactgctcccggccaaaaagctccttttttaaaggtttgtaaaagggcccagaaatcttagcagccacctgtaaaaatagtaatcccctctgaatctgccctaaggaattcaagaacagggtcaattctggggcctgaataacactgtttaatttgatttatggagaccaggtatgttgcccaggctggtctcgaactcctggcctcaagcaatcctcccgccccagcctctcaaggtgctgggattccagatgtgagcaaccactggcctggataattcagatgtgtcttcctacagtgcccatggcttcatggacatcagtgaatgtacagagaatatctggacttgaagtggagagggaaaataaggggccccatccattatacctaccctctcattccctgcattctatctcttatccaattatttcttttccttcacaataactagttcatttcactttccaagccccagttccaacataaaacacaacattataaaatcacaaaatacttaaaaagcataagaatgaacttgcttctctaatactgctgaggcaggcatggaggaagctgtaaccagttaagggccttgcctggtttatgcttctgagccccagcatcttgaagacgcttcatttggctgtctaagcaggtacaatccactttatacactaagaaaatgcctccttgggggtccaaccacaccatagctacatgactcagatttaatacgattgttctaatttcagctatattacttattgtctctccaaccattgacatattccagaaattcgaatagctatgaagccaaactatgcctttcagatctctcatgcctggaaatagctctcatgaccattgttgaactacatttccagtttctggaaaagatggttcctataactagggaccatatttcagaacagtgaagcagaatttcatgcaaggaatgtgtgaaactaaaagtatctgagacaggtcttaatcaattaaaaaagtttattttgccaaagttaaggatgtgcccatgacacagcctccagaggtcttgacggtatgtgcccaaggtggttagggtacagcttgctttgatacattttaggaagacataagacatcaatcagtacatgtaagctttacattggttcaacctggaaaggtgggacaacttgaagtgggggttggggggcttcaaggtcacaggtagatttaaaaattttctgactcgcaaatggttgaaagagttactatcaatagaaaggaatttctaggttatgataagagcttgtggagaccaagattttatcacgcagatgaagcctccaagtaggcttcagagagaatacattgtaagtgtttcttatcggataaagcctgtgttgattgtaatgctggtgggcttttcttgaattctaaaagagaggaggatataatggggcatgtctgaccccctctgcttcctatcacggcctgaactacttttgctgattaactttggaatgcccttggccaagaggaggggtccattcaggtggttggggggctcagaattttatttttggtttacaaatgccactttggcactgatcaggacatccccagcctaggtatattttgattctgatggcagcccatggaaactttttctggtggaatgtggttggcttccatgaagtagtagaaaaattgcctagatggcaaaggaccaagaccctagtcattcctgcctcttttcccatagggccctggtttctgctgccacaacttggtctttcctgggtttctcaggaagaaacctgagacttgaagtgaccacttggaactgttgtatttgactgaaatatgagaaaatgtctctgcccttggtttgggtaagatatgcctaaaagatggaagaaactaagaaacattataaatataaaactaacggtgctagttatttatcctaacttcttaagtctaagtcaagatctgacttagctgtggcagcattagaggtaccagcatttgttccttttcttacctctgggttagcaagaagcaaagctaattagtttctagactaagggaaaactggctgggcattgcttccaggcctaggaggattctcagtccctaacagaatctgcctctaagtgtctctggatgaaacattcttctcctaactctatccttcacccctttggccttgaaacacaacacgcttggtatccacagtcaccctggctcttgctgtggtccttagcctctgagtagcaggaaagggagccaacatctttagtgcctttgctccatgccaggcactatcctcccaacgctacatacacacatcatgaagaagggcaccaagtgaagaaaggagcttcctccctggactttaaatattcttccctgaagctcagaaatatgctgtaagtattaaaaagatggtagtactgcccactgacacccctaccagccagcatagaattcaaagtataaagaacactgaactataaaaatacacacaaggtaaaaaaaattgcttaaagtcacttctttctagttttcctgattataaatttctagataagttcattgaagcttaacttttccctctggtcactttttgtgtgtgtgttggtcagggatggcagagacaggttgccactcctgcttggctaatgctggaaggacaagctcagtcagcctcgcagatagcccagtgctgcccagacttcaggtgactctggactggcctaacaaatgccttccatatcttaaggttcttgatagcttggactgctgcacagcaaagctggggcagggggagtaccagaaggcaacaacctcacttggtcttggtgctgggtaaagaaaaaaatatatattccctgaaactgtgtatatataagacagtcatcatgcagatttgaggcctgaattcataacatctccatttcccaaaacctctgaaaccaagatttcattttaaagggctcctacttggcagtgagtccccagcttgaatggccccttagctttgtctctggtgtttggtatggctctgaagacagaagcttttggtccctggaatgcatagccattgcgcccagcactctcttactgatctggactcatgtgctggtttcatttttagcctctgcaaatctccctcatttttcttgctggcaaaaatgaagtacccaaaaatgtgtgtgtggttttgtcttttatttttttctttttattcagcatttcaagtatttttatcaaggatttttttaaaggctatttagtatgcactattctggaaatttaactcttcattccctacaatgtcctttctcttttagagaaacacttctattttgccccttgtttgtggagagaaatgtccaagaggactcaagtttaacaagtattcaagcacagctattatgaatctctaggtccccttcttagccacagccaaccaggtcttccatgtacaaccctccaaggcattttgttacaatttatagcatcagcaagatttctgataccacaattttttaaaagactgtttaaagagaaagataaatgatcatttctcccataaatggtttctcaaaagttaagaatgtgttagtttctctcagtagcacagcatggatatttatttattcattaattcaacatattttaaagactatgtgctagacgctccaagggaagcagtctgtaaggtggggcatttattcaacaagcatttggtaagttccttgcatgttccaagaacttgaaaaataataggaacgaaggcatggaggcaagaagcagcctggcgtagtcagggacccagagtggtttagaatggatggagtgtggaggtgacgggagatgggagaaagtagtcacaggtttatataaaatcttcttgagcttatatttttattcaaactttcaggtttagtatgctttcttcgctttctatgcttaaatcaatactttatattttaatcttattctttttctttaaaaaatggtatcagaatgtatagaaggcttagaaaataaaacagacatcttgtgattcataagagctccgtagcccatctccaggtcagtgtcaggccctgggcttcagtgggtcagaatggcaaccaaaggtggggtaggtacaggacacagcacatagcatcaggttgggagtctctaccaggggaatgttgaaatctatagaagaaaactaagactggtgccctggaagtcaggctggaccagagagaaaagaccaagtaacagaatctgaaatcacgaggcaggccctgtgttgaaggcagctccagggagtaagaaaactacagattccaggctggaaggcctgggaagcttcctttgtgtctgctacagatggtcaggaccacagaagggttctacataaggttgcctccaccctaggacagggagtgtctccctgccttgggtttcagaatgccccttgacataggcaggcaagggttgttatggtaccagagcagccgcaggggctgcagccgggaaattgctcaggcaagccaggccctcaaggggtgggtctggcagcctgattttcatacctaaattctcacaagctctacatagctacacctacagaactggggcccagtctaaaatatgagaatgtaggtcccagcaggcgaggatttgcattggaactcctggtagatcttttggaagactgaacaatacatcctctacttacttctaggatacagtggtctgcttttcactgggaggactttctgccattataaaataaagatagtggatgacagaagacttggagtgtacaaatatgacattgtacatagagaaatcagactgcctaagacaggtgtatgggctttcgtagagagaagctctgagggcaatagacgtacttgtttccagctttattaatgaataaacagtgcactgatcccagggctaggctttccgagaagcagccagcccaagtgcttctctgaatctcttcagtgacaggcacaggtttcctgaaggcaagaaaaggaatgaaattcaaaacagtcacggtggctttagggtgttgcaaaggtaatctagattacagctcactctccctgtcaggccatccatctgcctgaggcccagatcacggtgactgatgaccagggtgactgatgaccacgctgactgatgaccacactgactgatgacctcgctgaaatgcacgtccctcacagggagcctgccctgttcttcctctcagctcttttggggcctagttccccctcccagctcctgtctcaaaccttagtgccactcaagcacttcctcctcttgtcttcacacatgttcagcctcctgaggttcacctgccttcccactcccttaaatccatttaaaaaagagaagggagggcacgttctgggctggccctcaggaaggagcctgaggcaggtcagagctgagctaggctctggatgggcctgcttctcattacctgggaagaggtggaagggtgttctaagcagagagcaactgggcagtgaacagtctgatgagaatacagggattcctaaagggagaagggttagaaaaatagctcggtgcatttaaaggtggtcttaaattctaggatcagtttcaactttcctttttcttttccatgaccaccagtcaagaacagtttgaactttcataagcaatcaggagttacttaaatttgggaatagtgaaaagtaaaaataagcatttactttttttttttttttgtaaagacagggtctcactatgttgcccaggctagtttccaactcctggcctcgagcaattctcccaccttggcctcccaaagtgttaggactacaggcatgaaccaccactcctagccaagaattaacatttatagttttaaaataacagctaatatttacattttgtaaggaagagtttgtttctttggaccctcacgatagccctgtggaaaaagtcgtgttgaatctggaggcaggtataggatgaattgcagtgttgcccaactgttcatgtctcctgctcctgtggagcccccattaggaaatgccgggttctctgtagagtggataaggggaggaatagcagcagcttctttttgttgcatccattccagaaatgatcaggctgtccctgagcagtgctcctgcccttatctatggctgggctggaggaggagaggtgagcagaagtggagagaggcggggagagcaaggggatgccaagattatggtggggaggagttggtgaatggacagcagccaggacaacagccaaccatgaaaagaagtgttcattagcagccagatcccacccaggtgctgtgagcacccctgcaatctctcttaacctccactttggaagacagacaattaggctgtttttgttcacatggcagagactgcttatgggatactcagcttttctaacagtacaggccctttgtgggagggtcatgaaaggtttggagtgtgtttgttattcagtacaatgggatcagttatgctgctgaaggaatcttgtggaaatgtttttttctctgcagtgagaataaggaggagcaggaaacacaggtatgattacgaaaaggactggtaatcaaccttacattgccttttgtctcgctctgcttgtaccagtgaaaaatagtgtgcacaaggatgatgaagaaatgctaatacatgcttatggcaatcagggtgatgctataaataggacaggcttaagaataatatagaatggctttgctgcaaactcaaatacggtttaaggaaaggtgtctatttgttaacagtgtgaaattttccacctgatactcatgccccctccagttttccttccagagtcccaaatgaaagacacttcctgggggggagagaaatttttttcaatctatgtaagattgtatgtgctgtccttccatcagttacaactgtacaaacacaagcctagccactgattcgaatcccaagatttacaagtcttttgattaatataaaatatgggataatggttaagaccaacgatgatggcatctgagacctgagtctaatcctgctctctttaatttcccaggactgagtcctcaggggaattacttaacattaggcctcagcttcctcatctataaaacaaagataatagtatctatctccgtaggtcgtcatagggattagattagatcgatgaggcagtgtactcagataaatattagctatcattcttatatgattaacaaaggttttaggaggcatgtgcagacaaagccaaggccagagcaaatcccagggaatatcaaattacagaatcatgtaactaattatttgaaagggcctttcaaaattgtttgaagctttatctggtactagaaacttttcccaccccctgtgtgtttacccaggccctgcttgcacatgcatttgcaggccagtctccgcgagctctgttggaaagtttctccaaagtattttgagtctaaatctaatctcctagaactttcactcagtgcctctgtttcttcctccagagtgatggagaacaggccaaacaccacctttcaaatactgaaatgatatcactatatttagtcttcttcaaattaaaccaccctagttccctcaactatttttcaaaaaacatgatttccagtcatatcaccgccctgatttcccttcttctaaatcagtggttctcagctggggtgacacgtctggaaacatttttggtcgacacagcaagggtagtgtcagtactggtatctggaagttacaggccaggaatgctgctaaacatgctacagtgcacaggatgacccccaataacaaagaattatctagcacaaatagttcgtagtacggagtttgagaaaccctgttctaagtatgcatgttaatcagtgttctttttaaagtgtgggccaaaaatgtgcatggatgagtgtcagctaacattgctattgtaccgccactacattgctattaaattagcctgagattcccgtggttttgtagctagcagtgaattaaagcctcctttcatgtgtttctgctaacccagggatggaatacacagggcccacgtgctcacttagaaaacattcataaggctgggtgtggtggctcatgcctataatcctaatactctagaggccaaggtgggaggattgcttgatgccaggagtttgagaccagcttgggccacatagtgaaaccctgtctctacatgaaataaaattagctgagcgtcgtggcacatgtatgtagtcccagctactcaagaggctaaagcgagaggattgcttgagcctaggagttcaaggctacagtgagatatgactgtgcaactgcactgcagtcaggggaatagagccgggccctgtctctaaaaaaaaaaaaaaaaaaaaaacgaaagaaagaaaagaaaacactgaaggccaggtgcggtgcagtggctcacgcctgcaatcccagcactttgggaggccgaggtgggcggatcacttgaggtcaggaatttgagaccagactggccaacatagtgaaatcccatctctactaaaaatacaaaaaattagccaggcatggtggcacatgcctgtaatcccagctactcaggaggctaaggcaggagaattgcttgaactcaggaggtggaggttgcagtgagccaagatcacgacactgcactccagcctgggtcacagagagagactccatctcaaaaaaaaaaaaaaagaaaaaaaagaaagaaagaacaaaaacactcagccaggtgtgcctgtaatccccacacttttggagaccaaaatgggaggatcacttgaggctaggagtttgagaccagcctgggcaacatagtgagaacttgtctctacaaattttttgttttttaattagctgggtggtgtgcacctgtagtcccagctacttgggggaggtgtggtggaaggattgcttgagtgtgggaggccaaggctgcagtgacccaccatcgcaccactgcactccagcatgggcaacaaaatgaggctgtcgccacccccaacctaccccgccaaaaaaaaaaaaaaaaagaaaagaaaacactcattagtggtggcactcttccctgtgagcacagaggcaatcttgcagtctttttcaacacaatattctaagccaccactaccagtcattcaaatgattgttggcatacaagatgaaatctttctgccagccatattaccctagttttacagtgttgggacccaggtcatgatttaattctgggtcctgtgctttggaagaatccactaaactgtgctgtgattcttgggggtagctagaaagaaaagaggatgcttcaacctgatactcaacagcagccaagtctcttatatgcaattccccaaaattcctttcccaaatacaaagcctggccatctgctgccatgttgatggagcaggggctgcccagaaaggatgtcctgtctcttccacacacacccctcaagccccacataatgactcctcctcattgcaaagttctcctcaagcctgcactcaccattcctgatgcttctgctctcggtttcctggaccaaagccagccttgactttaccagtataaagagatacagggagaggggtagaggccaggaaacatactctacaccttgaattcttcagcaaagcaaaaactggagtagacaacaatctaagcttctcagaaacctgaaacctatgctaatcaatatctaggaaatggttagttttaccttgaagcccaatgctttattccacatagcatttaaaataattccttttcccctttataggaaatactttttccccataaagaaatttcctttcccgcttttaatcttctttttccttttttgtttttttggtttttttgaaatggagtcttgctctgttgcccaggctggagtgcaatggcacgatctcggctcacagcagccttcgcctcctgggttcaaacgattatcctgcctcagcctcccgagtagctgggactacgcatgcacaccaccacgctcggctaatttttgcatttttagtagagacgggctttcaccatgttggccaggctggtctcaaattcctgacctcaagtgctctgccctcctgggcctcccaaagtgctgggattacaagcatgagccaccacactcagccttaatctcctctttggataggctgaagtaaatgtctttaatttcagcattctttataaacctagtcacctcgttggtttgtgaacaatgtaatatgtttgctgcaacttgatttactcaaatatcctccttggtatattcaaataaatcacacatttgcaaaactaatctagttttcagggttttaaacatttatcaatcacacgagtggagctaaactaatgatctataaggaatgtggtatctcccagttctgttagtatttgagaaggaggcagaaactcgagaacatagaaaccattcatgtttgaataaaacaaaaagcattttatgttttccagactgagcattttgagctttccacactgtgtagcagatccagaaagctcttgtttttagaaaaggtgctcgaggaggtgacaggagccttccaaacatgaggcctcctgccactttttctagaagtatagcatgtagttaagacctcaagtctgtaagtcatacaccctcaaattgagacctgacattcccaccttccagctgtgacagcttcatctgttacttaagctaagcctcagtttccccacatgtaaaaaggtaatgagagtagtacttacctcatggggttgctgtagggttgaatgagaaacaatataatgaggcattatgcctgataagcatcggctcttgttatgccatgccatggacctctgataaatgaaaggttgtttaagagataggtgtctctggccaggcatggtggctcacacctgtaatcccagcactttgggaggccgaggcaggtggatcacctgaggtcaggagttcaagaccagcctggccaacatggtgaaaccctgtctctactaaaaataaaaaattagccgggcgtggtggcacgtgcctgtaatcccagctactcgggaagctgagacgggagaatcgcttgaacctgggaggcggaggttgcagtgaactgagatcatgccagtgcactccagcctgggcaacagagtgaaactccatctcaaaaaaaaaaaaaaagagagagagagagagagataggtatctctcttctggtttattttttggtgtgtgatacagtaatacagcctgtccgctgcagtatatgtttctatagcatcaatgagctcatgtgtggttgcaaaacgggaatgatggcaggacaacatggacgttgtgttggttcacatgccttttctttcaaagcaaggagagttgaaatagcagaatagaatgagaacttcagtgggaaaagcttagcatggctttcagttctatttttattttatgaaaaagaatttttttgaatgaacatctgcacacggggctccctctccagagaagtacatcctacccttgcgtgtcctaggctgcacatccgcttcacagcgaccacgccggctcacagcacccagcagcgggagtgtttattttattatatctgtgcattttttatatcccctgaagtagtttctggccctactgagtgcctgccttgtctgtctaagttatctcccgaggtactagttattgtttctgttagtagactaattacaaagtcgcataggtttcgagcgctctgcctttaagcctattttcccccataaggcctgttacctttattgtgaatgtgaggcttttcaggaatgtgcatatgttttaacaaaggcccaatttctttcacatgctgcagaaggcagcagcagctgaagcaggcatgtgagggaatcgaaccaggccctcctcaggaatggagacagaattccaggctgcaaagctgctccttcacctggaaggctctgggttctgcagcctctgaaagcaccttcccagcccacagcccagagcactaaagtgcaatgcttagatcctgaccccctgcacccccagtgcagcagaaataataccttttctgtgtgtttctgccttggacagagagtgtgtaacagcatggatcagctcaatatatttctgaataaagcctttttcttcactttctttgaaatttgttcatggaaatgcactttgattatctctgtttcccctgggtttaaattcttcctacctccctagatcttggctcattgtaatctccacctcccgggctcaagcaattctcctgccccagcctcccgagtagctgggattacaggcacttgccaccacgcccagctaatttttgtatctttagtagagacagggtttcaccatgttggccgggctggtcttgaactcctgacctcaggtaatccgcccgcctcggcctcccaaagtgctgggattacagccgtgagtcaccgcgcctggcctgttcatttctttactaaagccctgatcacattctgcctcagattattacaaaggtttgtgtgtatgtcacgtcagtttaactataagcttcttgagggcagggaccttgtttatatcatctctccatttctttcatattgactagcactatgtctttcacatagtaagtacttaataaatgtttactgaatgagcaagtcctccaaaagcattgatttttatttgggcccttttgtaatgagtgggtaccaaaagtacactgtgaatcccaatgcagtggttagaagacatagttttgcattaaaaatttcctgcagcatagttattggaaaccattgaggggaaagcaaagatcagaaagcaatgtaagaacccctgaagtgaaatatttttttcatctttctaaaaaattaataagcaataggcaagaattaatttagctgctctggtagttcctgcttctctttccaaggctctggaagttgaattgtttcccaagggaatactagctcagaacaaacctcacggtgattcctgccctgatagggaatttggtgacagatggcagggttgttttcacagcgagggaaacgtgggcctggtgtgatggaggggctcaggagctttggccgaaatgcacaacttccattgtcccccctcttcttggcaagggcccaggtatctgttcagtgtcgctgttcaggtcccctcccgtaaaagtcacagcttttaataataaacttacagcaatagtttataagtaaaatttatttatagtaaaaagtagtgtatgaatagccctttctgaataatgccacatttattatctaatttgatcctgaaacaacctttttgtattagtttgctagtgctgttgtaacaaagtactgaaaaccaggtggcttagaaatggaaatgtattatctctcagctctagaggctggaggccaggatggacatgtctgcaggatttgttacctgtgagagcagtgaaagagaatccattgcatctctctcccagattctggagttttgctggcaacctttggtgttccttgagttgtagatctctgctttcatctttacatggtgttgtgtgtgtgtgtgtgtgtgtgtgttcatctgtgtccaaatttcccctttttataaggacaccagccatattggattaggaattaaccactaccctactctggtatgaccttaactaactacatctgcaattgtgtccggaatttattccttctggtgggttcatggtcttgctgacttcaagaatgaagccgctgacctcgcggtgagtgttacagctcttaaaggtggcgcgtccggagttgtttgttccggagttgtttgctcctccctgtgggttctggtctctctgacttcaggaatgaagctgcggtccttcacggtaagtgttacagctcataaaggtagtgcagacccaaagagggagcagcagcaagatttactgtgaagagcgaaagaacaaagcttccacagcatggaaggggaccggaggagtttgccgctgctgtctggggtgcccagcttttattcccttatttggcctcacccacatcctgctgattggtccattttacagagtgctgatccgtgcgtttacaatcctttagctaaatacagagtgctgattggtgcatttttacagagtgctgattggtgcatttacaatccttcagacagaaaagttttccaagtcccccactcgacctaggaagtccagctggcttcacctctcacaatgaccccattagtaagtaaaggcacactctgaggtacttggggttaggacttcaacatgtgaatgtggggggggacacatgcagcctttataataggtaaagcaggaattactctgtttcccattttacaaaaaaataagcctcagagcgatgaagtattttatccaaagtaaatgaaaaccctaggccacacacaagtcggctgcctgtgtcagtagtcaaagacagcagatggtgcctctcgctatgactttatctagctgttctcactctcttggaccagtaagaactgaggctacactgaggtgtgggaaaagaggagcagtggccaaatatggtctcccttggaatcaatttagcagatgccctattatttaaagcttcgcttgctgccttgtggctgcaccttatgagggcttggccggcaggggaactgttgtttctgtctggtgggcccattcctgagccataggaggctgggaacaatgagcctattcagggcagaaagtgcaaagccccgcgtttcttttttctctctatagcatcgttctttgcctccctgtgcctttcttttgtcctgcctattgagtaacatcagcgtgggtgttgggagcgtgtgaattggcagccgtgtgagcgggcggctgaggacgtctgaccgatgatgtatgcgccaggacaggcagcaacgggcgagcttcccaggaaccactttgacctatgccttctgctctgcctgagtcactctcacgagctaaagcaggtgacccctcatggagtgcttgttccccttggcaaagaaaagggacacgccccatcggtgagctcctacccttggtacacttggagggagttgagtacagatttaagagacaaattctaatctctgctctgccacttgccaactgtgtgactttagggaagatgcttaatctccctgtgtcacttccccatctataaaatggagacaataaaatttgttctcctcctaaggttactaaatggataattgatataagttatacatgctgcttggttggaacaacatgtctgccatataattctagcacttagtacatgtaagcaatacttccttatttgtttatttagtttcccgggtgtcatttgttaatctgttcattaaaaattggtgaggatccaccagttagaatgctgataattaaaaagtcaggaaacaacacatgcaggcgaggctgtggagaaataggaacgcttttacgctgttggtaggagtgtaaattagttcaaccattgtggaagacagtgtggtgattccttaaggatctagaaccagaagtaccatttgacccagcaatcccattactgggtatatacccaaaggattataaatcattctactatagagatacatgcacacatgtggttattgcagcactatttacaataccaaagacttggaaccaacccaaatgtccatcaatgataggctggataaagaaaatgtggcacgtatacaccatagaatactatgcagccataaaaaagaatgagttcatgtcctttgcaggaacatggatgaagctggaaaccatcattctcagcaaactaacacaggaacagaaaaccaaacaccacatgttctcactcataagtgggagttgaacaatgagaacacatggatacaggaaggggaacatcacacactggggcctgtcaggggggctgggggcaaggggagggagggcattaggacaaataatgcatgcaggtcttaaaacctagatgacgggttgataggtgcagcaaaccaccatgacacatgtgtacctatgtaacgaacctgcacgttctgcacatgtatcccagaacttaaagtaaaataaaataaaaaataattggtgaggattatatcaaaacacagtggttgtatttagatgatgggattacaggtgatttatttgtctcatttttgcttgtttatattttctaaactttctgtagtaaatatgtttttgtttttgtttttttaataaaagaaaacagactcccactgatgacttacggagtgcagtagatgaggtgtgagtgggtacaaagtgaagaagatgtgaccattgtccttaatggagtttaaagtctatggaaggagataagacagggagacaaatgacacaagagagtggacagtgatgctcagggaaggctgggaacaggaccagtccttctcaagtggcacctggcattaaagaaatgttttcatcattcttgccccaacagtctccatatatggtcttccctgatctggaaataggacagtaaatggcacagtcagaggcaagggtcactcttttcattgatcccagagccccagggggatggggatggaattgctgaaattcctttctaaggtacccgtttctaggaacaagcttatgtggaagaaaaagttgagatgctttatgtaactcatcttatccacaacagatttgtaccccagttgcaaagcagcacatcaagaggaatggagaactaattttctgtttctctctctcttcccgtagcataattagcatcatcattattctggctggagcaattgcactcatcattggctttggtatttcaggtatgtgatttcttgcattactacaatctattcacccctcaccattaaactcctaatcactcagtgcgttagcatggaaagagcccagagctttgacccagaaaacctcagagtatagcattcattcttctacttcttgtgctttctctacattagtcagttaagtcctcgacttcagtgtcctcattttttattatttatttatttattttgagacagggtctggctctgttgcccaggttggagtgcagtggcatgatctcagcttactgcaacctccacctcctgggttcaagccatcctctcacctcagcctcccaagtagctaggactacaggcatgtgcaccaccatgccaggctaatttttttatttttagtagagatggggtttcaccatgttgctcaggctggtctcaaactcctgagctcaagcaatccacctgcctcggcctcccaaagtgctgggattgccggcctgagccaccgtgcccaggctagtttcctcatttttgagtggggagatactgtcaacatcaccagttagttgagataatcaaatgagatgtttatcagtagtctatctatcagtcagtgctgaagatgtcattctgggatcataggtgaagtgctgcctctgagccattctgtcagcggttggcctgggtagatgatttctttgcaacgaagcttcagctgaagtgttaaagaatatcaagtctttgtacacaggggtcttaggtaaagagacaactggtcatgactactgtaccatgtaggaaacagataccgctgtagcacagatggttagtttctgaacgtatctagccaatgtcagttgcagaagagtctcttcactttcctcttctgcataggccactgctctgaagcatcttttatggatgctgctttaattttgacactgaatgagttaaggctggcagttttcttctctgaggcaaattgtctgctctttttttcataaaccacctgactcagtccaacacattcattttaactcagtctgtgaccaaagctccgtaactttattttctatattccagtggcctttctgccatgcttctccagtgtagacatgctggcactcaatactgtcacaaagtcgaagctaagaaaacttgctagagttgtgtttgctagaaaagacattcatcccttccccactttctttgtcatcaatcatatattttttaggccagttgtggtggttcacgcctataatcccagcactatgggaggctgaggtgggagtactgcttaaggccagggttcaagaccaacctgggcaacaaaaagagaccctgtctctacattaaaaataaaaaaagtaaataacatgtgtattttatcttccattcatttttttctattggggtatttgtctttctctttttgatttgtaggtaattccttctttatcatggatgcaaactagttacaggtatcaccaaatctcttctactctacactttgcttttttactctcttaatgatgtttttcaatgagcagaagttcttaattttaatttttattgatccttttctttatacttggagctttttgtaacctgtttaagaaatctttgcctattccaaggtcgtgaagatgttcttctagattatcttgtagaagctttattgttttgtctttcacatttatatctgcaaaccatctcaagttaattttatatgtagtacaagagaggggtcaagattcattttttccttatggtatccaataaacccagcaccactactgaacacactgtccttcccccacttcccttcagtaccgtcatggtcgtaaatcacgtatccaaatgtgtggggatctgtttctgaattcactagcctgtttcattctaatactaatttcctatgttaatttatttcttttcctgttcataatcttggttgttttctctcaaccaagtttctgaaatcactagcctgtttcattgtaatattgatttcctatgtttctgtttctgatctgtttctgaattcactagcctgtttcgttctaatattgatttcctatgttaatttatttcttttcctgttcataatttcggttttttttctctctttctttctctctagtcttctctctttctctttttctttcttctgctctctctttctctctctctcatatactaaaatagatttataaggtattgttagctttatagtagttttgaaagaaccagcttttagcttatttatattttctctgatctgtattcctattttactaattttggcttttatctttattaatattcctcttcctgctttacttggccatctttcaattctttttctactgtctcaaaataaagcagctcacaaggagtgtgagtgcttaaaaaagcagctcacaaggagtatgtccaaaaggccaataaatagcttttagtagatactgccattcaattttccaaagtgatgagtcaatctactcttcaccagcaatgcatgagagatcaagctctccacaccctcaccaatactgggtgttgtggaattttgtggttttaatttctgtttcctggtgacagagactgagtacattttcatatgcaaaacataatgtggaactacagaagagcacaaaagagtaagttctgtatgattctatgcatatgaagttcaaaaacaggcaaatggatctctgctggtcaaaggtagaataatggttcttattacctttggggacaagtaagcaggtagcagtgaggaggggcatgagggcactgctgggagggcagtaaggttctatttcttggtgtgatgatggttacatggaataaagttataatcattcttcaagctgtacagttatgatgtgtggatttttatgtttgtatacttcagtacagacatacaaaaacatttgtaaatgtatatataaaaacataaaatgcatataatgtcatgtatgtatatatacattttatgtttacatacatatatattcttttttttttttttgagacagtcttgctctgtcgctcaggctggagtacagtggcataatctcggctcactgcagcctctgcctcccagcttcaggttattcttctgcctcagtctcctgagtagctgggattacagacgtgcaccaccacacctggctaattttttgtacttttagtagagatgggattttgccctgttagccagactggtctcgaactcctgacctcaagtgatccacccacctcgacctcccacagtgctgggattacaggtgtgagccactgctctctgatttacatatatattctttataaggaaataaaatatagactgataaaccaaatattttggaataacttttaaagatagtaatgctaaagtacattttggtaccttcctcactaaggcttaactctttttttctttttctttctttttttttttttttgagacagagtagctgggattacaggcgcgcaccaccacacctggctaatttttttgtatttttagtagggacagggtttcaccatgtgtagccaggatggtctagatctcctgaccttgtgatccacccgcctcggccttccaaagtgctgggattacaggtgtgagccaccgcgccaggccactaaggcttaactgttaattataatttaccctattcctgatcttatacatcaccttcaactaaaaccctagtatttatttgtcactctaaatcttgatgactaaactttcttggacctaaggctcactggctttgcatcagaactcttaagagagttgtttatcttttggttgttagtggtgttgactctcctagcaagaattttcacaatatcataacttccctgtgttagtcaggaggtttgctacttatatcttttcctgttgcatagcgacagccacctcaagaactgtactcagctccttgaatgcacagggtgctccgtaagtgctttttgaatggacagttggatggatgcatggaggtgtgaatagatggaagtaacagtctgctcaatccagtaatgtaccatcaaaaatttaaaactctactactgccaataaaaaggtgttctgcctccttcccatttcacagggtgacagctggttatttggataaaatgggcagtttgttagtttaatactgtttagttggattttttcaattgcctctattaaaaggactataacctttatcagagatcgtattatcacattttaaatgaattcaataaaatattagctggtttaatatataagacattgaaattaagcaaatagcgttaagcagatgatgatatgtattaggccgttcttgcactgctataaagaaattcctgagactgggtaatttataaagaaaagaagtttaattggctcacgattctgcaggctttacaggaagcatggtgctggaatctgcctggcttctggtgaagcctcagggagctttcagtcatgatggacggcgaggggaaacagtcatgtcatatgtcgaaagcaggagcaagagggagagagagtggtggggaggtgccacataagtttaaacgaccagatctcatgtgaactcagggcctgagagctcacttatcaccaaggggatgacccaagccatttataagggatctgccccaatgacccacacacctcccaccaggcacctcctccaatataatataattggggattatatttcaacatgagatttgggtgaagacaaatatctaaactttatcatgatgatatcttttgaatcctttcttcatgcacttcactgtactaaataactttgcatgcatgatttgccttactacacacaacaaataggaggtagatgttattactatgatgagatgagaaatgtgtggaaggacacacaacagtcagcaagtgagcatggctgtatttcaagccttgggaatttgtttcccgaacctacactcctacccatcaccccataccaatgacaacgttcacacagagttgtagtggagaagggtgttttatggtttgccttgcaggcatgattcctgagaccacagcttttgaaaacataaaacttttccccaatacagaaagaaattctatttctttgtaactctcctgatgctgtatatgccaccttctcatagccatcctcctccttacaaattctaaataaaaaccccagaaaacataaaatgcatttgcggtggaccatttgaaagagaggttgaggggttccaatcagcccctggttaaaggacaacccttgtggataagccttcgagaaggaaggagacgtgatggaaaggcccctaaccatacccagcccagtccctgcgctatcacgcaccctctgactttgaacagctctgtataatggaagaatctcagaatcagagccattccaatctcagcgctcacactaactgtatatcctttgggatacaacttaaatgtttcctcattggtaaaataggcagggtcattgtgagaattaaaggagagtccactcacacacctgtgtgtgataaacagctgccattgttatttatattgatgccatcaatgcttttagtaaaaatctgctattattaacgcattcatatagcacctcctaggaactgcacaatttcctggtcaaccaggaaaggcctcctttgaagccacaggatgctgcctcctaataattgttacaaacaaaacctggaactgtaacatgtgtcccgtatcgcccccgcaaccccacccccctgccagaactgggaagctgttgaaagaccaaagaatgacttagacaagtccagtttggtgagtaaatgagtttattaggacttacatacagggcactcctgggtggcagcaagacagccctagagatctgtgccatctcccatatctaagctgcttttaagctggttttctggctctttgcctgctgtgtgtttgcaatgagactgtttttcttggtgtgttctcagatactctctgggatgtttaggttctcagggacatctgctcctcagctgggcaccaaggccttggcttaccacccagctgttggggttcaagcagcagacatacacccctaaataacctggtgagtgacctatcacactacagtaatgctccagcttcagacattggataaaccgactaggtgtgtgctgataacaccaaaatggaaacattgcacagtttatttagaaaatatttgatctgtccaaaaaaaccttcgagtcatctgagaaaataaacagctgtgggcctttcttacacttattttgtggtttttagttgttttgatttttaagtgaagtagggatatcttcttattgggttggcactctacatgtctcaatctggccctgggtatcagcaaaatatggtagaaagggcataggctcagggccagaccaggttgtgtttgaccctgactctactaacagctagatccaaggcattcggcaagccatttaacctcatggagtctctatcctcatccataaatgggtataatggtcattcttactctctcatggcttaaaatgagtctctgtaagcaaacatttagtgaaatgttgttttccttacctcctggggctctgatctgcaatctttccaaatgattgtagttaataatggttattaatatcaatactgatttaaggtttagcatgtggcaattcaggtacaatatttagcactttacctgcattgtatcattaagtcctttcaggaaccctctaagggagcatccccattttacagattttaaaaaatggtgaaataaagggttagaaaacttgaccaaggtcacatatccaataagtggcagagctgggacttcaacccaggcagcctgtacctgtgccatgttctcaaacaccatgttctgctgctttcctacattgttcccgtatctggccttgcccagtgtccttttaaatttcttctcacggaagcaactgttctccccaccccaccgtcttctttggcaagagtgacactcacaggtttgaccccaaggttaagctttgcatttcgaccttgtaagccatgtactgtggtgcccatctggacagctgagttttagcagatgctggtgaccatctgctgaagacatctagcatgctctctatgctactggaatgtacgaacctgtctttctgagtcatttcaaaggacagctcattttccaggttttatccagcgctgtgggctgccccagcatcatagtttctgtaaagaatccttgtcttgtgttacctatacccccacttcaagatattcctactcctacaacggagcgctgattgaatagtactcccactgtgtgaacccagagctgctcaggtttcgtcttgcccctgctttaacagccccactttcctcatgcagacaggagctgtggtagttaattagccctcacaagctggataattaattttcagtaagtggctcagtcttccaattttaaaggggtttaatgaaatcttagaggtaaatgaaatgcttaaaatctgtgcccatttaatagaattctctatcaataggtacctgcctctagcccatctccatggggtccttttgtcctttgactcaacaagtcacacaagaatctctggtggagtgagtctctgtctccaaaaaataaaaaaaaaagaatctctggtggtcagtaggcctggagagtcataggaggccagatggcataatcctccttgagcctatgtttgtttgcaagtctgaatagtttcttttcttgtgagaagtaatatttacatgtggttgcttgcaaattaaattttgtcacttttaacaatcatttattcacttaacaaacaagtattttattgactgctttctgggtgcaaagcaatggctaggtccctgtggtttttttaagttctcactggctcttatttctcttctttatttgacattggggtggaggggatttaatcaacattacactcattccatctgccacatcattaatgcaaccttaaatgactagaacctgcagcaggtccctagggcattccacagctgcctacttttaatcattaacttctctgggagatatttcaacggattccctaactgtgagctcaaggccaacatattaaaattaattcagtaatacagttgctgaactaaggtatgtcattaccatttcattctctccataaactgtgctaatcatgtattttttctgagaagtaatctttcaattcaactttaatggcactttatcaacaaccatcaaatttacctttgctgtaacatagttgtatttgattcatgattttattgtgaacctctcagtatttttattgccttccttttcattggatcacatttccccaaagtttagatgtggtaatcctgccaaacgtcccttactcctacaataattttagcctatctcaaacaatgctttgatttctactgatttccatttatttattcatttattcataaactcagcaaacattatttttctctgcagaaacatagctctaggcactacaggacttacagataggattaagacagtttctgctcttgaaaagctcacaaactagttccagagatagattagagaccaggtagagggagacagctgctataataaaggccaaaaagacaaaaagttacaggaaagtaaagagagaatctactaatttttcctttggtgaattaaaagaggatttcatgggagggctgccatctgaacggactttgaatataagtagaatttgcataactggtgttaaagaagtgtgagctatgaattaataggtacaagatgaacagcagtgtgaaggcgcatagtgtaattgtgtaacccatgctagcctgggatgccttggatatcattctctaagtaacaatacttgcaaagcaaactgaatctttaaatcaatgttcaagaaaataccaatgcagggaatggaggtgtgttgtgttcttattacacagcaaaaacttcattttgtcctctttcataattcgtctcccagatctcccacaggaatggccatgcatggcagctgcttccaaagtgtcttttctcacgctctcaagcctccaaaacatccttccaaaccaggctatgtacttgtttttgtctcctcttcctccttttctagctataatttttcttccatcagtagccttctgttctttctgctgcaaatccatctagattagcttctccagttctcttcctcattcattaccctcatttactttgtagaggtctaggagtcaatgagataattccaacccctaataggctggaagaggagaagagccaaggatatccttatgttgataatgtttacctctcacattaaaacaacaacaacaacaacaacaaacacgtctgctttgtttgtatgttttttatttaaggcagaaaatcaacaaataatttgatacagacagacagaatggactatgaaaggatgtagttggagagaaggctgcaaagacagcaataagggctaatatgtatggagcatttactatgtagcaggcagtgtttagctttgaagtccaggctggaaaatctgaaatccattccacagctcttaggaaccattaaagatgagtgattagaaaacagatatgttcaaattgtactgtaagaaggtctacctgtaggattaatgcatgtaaaatggattggatggaggcgaagatgaaaggtagaaataccaataaagaagctgataagtccagttaggaagtgctcaggacccgttatgttgggcttttttggctgtaagaaagagagacttgtgcaggccactttaatatcaggtgttgtttaaaggatgtgcagagattaggacaggaactagacctgaacaccccaggatccaagacagctctggggatgaaagactctttccatttttctctcccatggtctctcccccatacttctttgtgtctcctccactctcctcttgggctccaaggccatctgcccttagtttcatatccaagccacagaaagagcctctcaagaagattcagttaattaaatcaccccaataggtgtcctcagtcagcagcccccagtgtacaatgaacagctgattgatccttccttgactgggtaggctgtaggctggccaagtgaggaggaagcagttggatacagctggcacataattaatatttctactggtggtatgtcagtagaggagagggtggctttcattttaaaccaaaaatcaactgaattaaatacagttcttcattatgctatagctagcactgtaaacttgatcaaatcagttattttctcactgccttagtttctatgtcattcaaacagaaataaaagttacagcactttagaattcagcatttttcagaatgactaggccacatttagttaacatgagatttcacttctgtgctacttctggttaactgagaataacaataccttatatgtgtaattacagtttgcaaatcaggttaatatccatttgatttgatcctcacaagaaacctttaaagtaggtgatatagtttggctctgtgtccccacccaaatctcatcttaaattatactcccataattcccatgtgttgtgggagggacctggtgggagatcatttgaatcatgggggtggttccccccatactgttctcatggtagtaaataagtctcacaagatcttatggttttatcaggggtttctgcttttgcatctttctcattttctcttgccactgccatgtaagaagtgcctttcacctcccgccatgactctgaggcctccccagccatgtgaaactgttaagttcaattaaacctctttttcttccaagtctcgggtatttctttatcagcactgtgaaaatggactaatacagtaaattggtaccagtagagtggggcactgctgaaaagatacccaaaaatgtggaagcaactttggaactgggtaacaggcagaggttggaacagtttggagagctcagaagaagacaggaaaatgtgggaaattttgaaacttcctagagacttgttgaatggctttgaccaaaagccttatagtgatatggacaataaggtccagactgaagtggtctcagatggagatgaggaacctgctgagaactggagtaaaggtgactcttgttatgttttaacaaagagactgatgatgttttgcccctgccctcgagatttgtggaactttgaacttgagagagatgatttggggtatctggtggaagaaatttctaagcagcaaagcattcaagaggtaacttcggtgctgttaaaggtattcagttttataagggaagcagagcataaaagtttggaaaatttgcagcctgacaatgtgaaagaaaagaaaaacccattttctgaggagaaattcaagctggctgcagaaatttgcataagtaatgaggagctgaatgttaatccctaagacaatggggaaaatgtctgcagggtatgtcagaggtcttcatggctgcccctcccatcacaggcctggggtcctaggagaaaatagttttgtgggccgggcccagggtccccatgctgtgtgcagcctagggacttggtttcctgtatcccagctgctccagctgtgcccaaaagggtcttgggccatggcttcagagggtgcaaaccccaagtctcggcagcttctatgtggtgttgagcctgtgagtgcacagaagtcaagaattggggtttgcgaacctccacctagatttcagaagatgtctggaaatgcctggatgcccaggcagaagattgctgcaggagtggggctctcatggagaacttctgctagggcagtgcagaaggaaaatatggagtcggagccccaacacaaagtccccctggtgcaccacttagtggagctgtgagaaaacagccactgtcctccagaccacagaatggtagatccactgacagcttgcactgttcttctggaaaagcaacagacactcaatgccagcctatgaaagcagctgggagggaggctgcaccctgcaaagccacaggggtggagctgcccaagaccatggaaacccacctcttgcatcagcatgacctggatgtgagacctggagtcaaaggagatcatttggagctttaaaattttggacttgcataggccctgtaactactttgttttggccaatttctcccatttggaatgactgtatttacccaatacctgtacccccattgtatctaggaagtaactagcttgattttgattttacaggattataggtgaaagggacttgccttgcctcagatgtgactttggactgtggacttttgagttaatgctgaaatgaattaagactttgggggactgttgggaaggcatgattggttttgaaatgtgagaacgtgagatttggaggggccagggatggaatgatatggtttggctgtgtccccacccaaatctcatcttgaattatactctcataattcccatgtgttgtgggagggacccagtgggagatcatttgaatcatgggggcagtttccctatactgttcttgtggtagtgagtaagtctaatgagatctggtgggtttatcaggggtttctgcttttgcatctttctcatttttctcttgccaccaccatgtaagaagtgccttttgcctccctccatgattctgaggcctccccagccatgtggaactgtaagtccaattaaacctctttttctttccagtctcaggtgtgtctttatcagcagcatgaaaatggactaatatagtaggtaagacagacattgttacctccaattttctaagatccaaggaggttacatgacttactgaaggttacatggctattaagtgacaaagccaagacttgaattttcatcttcaaaccccaagtccaatgtgttctcaaggtttgggttacttggtcttacataagccattatatatgacagatctgctatatatatatatatatatatatcaaaatgattgtcttcctgctctttctcttcttgtcttcttattgcctctcatgttcttctgtatttttaatttatcacagaagtctctgtctggctttcagcaatgaagggtttggttgtagaagttccaaggcttcccttagcattgatctttgcttcctgaactgcagggagacactccatcacagtcactactgtcgcctcagctgggaacattggggaggatggaatcctgagctgcacttttgaacctgacatcaaactttctgatatcgtgatacaatggctgaaggaaggtgttttaggcttggtccatgagttcaaagaaggcaaagatgagctgtcggagcaggatgaaatgttcagaggccggacagcagtgtttgctgatcaagtgatagttggcaatgcctctttgcggctgaaaaacgtgcaactcacagatgctggcacctacaaatgttatatcatcacttctaaaggcaaggggaatgctaaccttgagtataaaactggaggtgagttacttttggagagagattttttaaagcaccaaaagtatttgaggctaaagattatgagttgcttatgaaatatgttgtgaccaatatcagacaatgatgctcccaattctgctaacagctgtttttgccattttatggccaagactcacaccaaccccaaaagtagccaactataagagaggccttaaaaatcttttgttctgggttctctctgcttcagaatttccaggtgtgttctctattcaacaaaataaatgtagcctcttttgtggtagcccctggtacagctaataagagcagcctagcctgggacatttccacgctaagtagacccaagcgcaatcctgaaatcagtatcttcagagactcatgacagtgagtgcattttagaagttcaaagggaactaaccaaaacgaaaacaacattgtcctataaactcattaattccccttcccctgcaacaatgaaatccaccctttgttgccaacccaatttaacatatgttttctgaatttatatacaagggactcaggtactgtgagagtataaagatgattaaacagatttcccctacccttacagagctcataatatagatctcacagagttaggggtcaggacagagataataaaagtctgtaaatgataataattagtaaagtgtatcaaatgctttaagagaaatataaatggagtgattgagaagaagagagagatcccgttcaaatgcataggagggaagggatgggaaagccccctggagaagctggcatttgaggggagccttgaaggataggcagaaaccgggcctttccagcctaaactagtatgcacaggtctttcttgcacacctcataacatgcatatgcaatgattcgaagctcagatctagaatcagacctgtgtaagtacagtggcctgggcaaagcaatctctctgagcctcagtttcttcatcttaaaatggggtcatgtcaaagggatactggagccaactgaaagagcttccaatggcaaagctggaacaatttaagcaacaaaataagtaacatagtattgaattataactcaaaggtatagaataaatacatatgacttcatacttatttaaataaatgagggatatgaaacaaattccccttacagatgaattccaaataatttatttagatctcttccctccaaaaagtggagcttgaaaccttccctatcccactcagggtatattggacttagtgaagtccagcttccaaagaaatccggcaaacactgctttagccaggtgatccaggttaacatcattaataagtcatgttaacagcatgtaccttctgatataatgtgatgggaagggcactttacctcctgtgctcttcctctctaaaacctgtaacctcagtctaatcaggagaaaacatcagatgaattctaacagaggggcaacctacagaatacctaaccagtactcctcagaactgtcaaggtcatggaaaatacctaaccggtactcctcaaaatacctaaccagtactcctcaaaactgtcaacgtcatggaatatacagaaaattgggaaaacatgacagactagaagaaactcaagcaacatgatgactaaaagcatggtggtgttctggaaggaatcttggaacagaaaaagaacatcagtggaaaaactgttgaaatacaaatcaaatctggaatttagttgatagtaatataccattggcggtttctccgttttttcttttttttcttttctttcttttttttttttttttttttgagatggagtttcactcttgttgcccaggctggagtacaacagcacgatctcggctcacagcaacctgcgcctcccaggttcaagtgattctcctgcctcagcctcccaagtagctgggattacaggcatgcacctccacagccggctaattttgtatttttagtagagactgggtttcttcatgttggtcaggctggtctcaagctcccgacctcaggtgatctgcccacctcagcctcccaaagtgcttggattacaggcgtgtgccactgcgcctggcctccagtttctcagttttgactaatgcacattggttaagatgttgacattagaggaaactgggtgaggcctatgccagaactctataccttctatgcaacttttctgtacacgtgaaattatttcaaaattaaaagttgatttttttttaatggggatgatagtattcacaggagtgttgtgaggatcaaatgaaataaggtctggaatacagtactggcacagaatataccctcaatgaatggtggttcattgtcatgtaaacttagtttcccacatcatcgcccaagagcgtgttccctgcctgctccgagcatgagtcttgtctcccctgctagagaacagactccttaagggttaggcaagggctttccttttactacttactcagcaccagctcagtcccaggtaaaggaagacgccaaataaattaataaattatattttaccccaataaaaagtccaggcttaaacattttcccacaactgtctctctgcctggatatggggggaagctaagtcttaatttcaaaatgcagttaactctcctgcgaggagaattaccttggaggaaaacaaatgtctgtttctatccctggataccagagctggacaatctctacccaagcaaactccaaatccctgtgatgacaaagcttgtgaatggaatttctgtgggtgatagatgaatgctgtttgtttcttctttctccttctccctacccaccctaactttatcctccagggagaaaaatacataaaatccagaagcttcacagatccctaggaaaatgcctaattccctaagggataggcttttttatgaccactgaagttcctcttacttggagaaaattttctattgtaaccataatatacctagaatttaggtccttggggtttgtgattggccaaagggttgtgatgtatagcaatactatgagcaaataattattcgcacctataatacaatgggctatacacaggtggacctctgaggaagtactgagtggcttcaatgataaaaaaaaaaaaaaaaaaatgactgcatttttaaggcctagcgcttcaaaggctatattgtcttacgtgtctgactttggcatctgccctttctgacttttgaccctgcagccttcagcatgccggaagtgaatgtggactataatgccagctcagagaccttgcggtgtgaggctccccgatggttcccccagcccacagtggtctgggcatcccaagttgaccagggagccaacttctcggaagtctccaataccagctttgagctgaactctgagaatgtgaccatgaaggttgtgtctgtgctctacaatgttacgatcaacaacacatactcctgtatgattgaaaatgacattgccaaagcaacaggggatatcaaagtgacaggtgggttcctgcatgcttttgtatggatttactggggaaagagtaaaatctaaattaaaatttaacttcattaatagatatataccaaggcacaaaaatctctagagtcctcttcactaagaatttgatcactcaattccagttgagattgtattacataagagaaagcccaacacaaaacaatatgtatggcatataggtcaaagatggcaattaggtttcatcttgtatgctttctcattgactggttgtctggagaacagtgtttaggattctgaggctctgtgtaactcagtaggactaccttgctacagcagtgaggaagtgataattacttgacatctttgatatgttcagctggacttcaagccctccaaaacttaggctagaaaccaaggtttgcttccaccctgcctttgagaaggctgtgaatctgaagactaaaagtctggagtctgacttagttttattcatccctcatgagactgactcatgatcccactaatattggctcaagattaatctgaaacccctagatggaactggtctcccagcaccctagctgagagctggctgagaagacccagcaccctagtctccctgcagtgctttagtgcatacaaaaccttaggttgagctagtatcaagaaaatgcatagactgaattctgacttttaagaccatccttcctggggcgaaattggattcaaactgtagtgaaaggagtacgtcaggaggctgccatttaaatcaagcctagcactgggcacaaaataccttacacattataagtaccctataaatgtttgccgaatctaactgaataaatcatattcttatgattttttaatttgaaattatacatatgaacccaaaattatctacaactcagatatatcaatttaaaaaataaattacactcacacacacaaaagtaacctatggaatgggagaaaatatttgtaaatcattttaaggggtttcaatccagaatatattaagaactcctacaactcaacaacaacaaaaatcaaataacctcattttaaaatgggcaaagtacttgaagagacattcaacccaagatgatataaaaatagctaaaaagcaaatgaaaagatgctcaacatcactaatcattggagaaatgcaagtcaaaaccacaatgagatatcacctaatgcccattagggtggctactctaaaaacaaaataaggcaaaaacagaaaataacatgttggtgaggatgcggaaaaattggaaccctcatgcactgttggtgggactgtaaaatggtgcaacttctatagaaaatagtataaagtgtcatcaaaacaattaaaaaaaagaactactgagatatggagccagccggacttcgtgggtcgagtggggacttggagaacttttctgtctagctagaggattgcaaatgcaccaatcagcactctgtctagctaaaggattgtaaatgcaccaatcagcactctgtaaaaatgaaccaatcagcactctgtaaaatggaccaatcagcgctctgtaaaatggaccaataggcaggaagtgggcggggccaaataagggaataaaagctggccactggagccagcagcagcaacccggtagggctgctgtctgtgatgtgcagggtttggtgttttgctgttcacaataaatcttgctgctgctcactctttgggtccacactagctttaagagctgtgactctcactgcgaaggtctgcagcttcattcctgaagtcagtgagaccacaaacccactgggaggaacaaacaactccagatgcaccatatctgaacatctgaaggaacaaactccggacacaccatctttaagaattgtaacactctccaaaaaaaaaaaaaaagaactgtaacactcaggttgggcatggtggctcacacttacactatcatatgatctaacagtcctgcttctgggtatgccttcaaaagaattcagagtctgaatgagatatttgaacacccatggtcacagtagcactattcaccaaagtcaagagatagaatcaacccaaaatgtccattagtagatgagtagataaacaaaatatggtatacacatacaatagaataccattcaggctcaaaaaggaaggaaatcctatcatatgctatgacatgaatgaactttcaggacattatctatgtgaaataagccagtcacaaaaagacaaatactatatgatttaaacaaagcatctaaagcagtcaaatgcacagaaacagaaagtagaatggtggttagcagagggcagggtggaagagttgaaggagaaaggtttttgtttaatgagtatagagtttcagatttgcaaaatgaaaaagttctaatgatttgttttataacaacgtggatatacttaacactactgaactgtacacttaaaaatgcttaagatggtaaattttgttgtttttactgcaatttttaaaaagtatctaactaaaaaattacatatgagagcgagagctcttgcaccatcttgaggaacaaattggcaactatcctggttaggattattagttgcctgtaacagaaaaccaatataaataaatctagtctgaaagggaagtgtaggaagtgtactagaatgttgtggaaccaaagacaggaagttcagttgacttcaggatcaactggaaccaggaacttaaatcccattgagattctttttctctcatttctacttaattctctctttactctcttgttttagtccatatggcaagacgtgattgccaagcattcctatatttaaaaatctcttactcaagagagtggtgagactgaacctcaattcatcagtctcattctacattcccaagaaggactttgactccacttgggtcagctgcccatacctaggccaatgaggcagtatctgatgaaaggccttcccagaagagaaggagggactgaagtattggtcatttaaaacaatgggtgctgacaacagtatctcagtccagttcccagtaaaaagctccaagctgtgtaaataatgtcttctagtagcaagggccacaactgaacaagacatagacattgagcacaccttttattcaattaacagatctgtcttctttacatgtttgttggatacatcaaaacaagtgttcgaagtgtcaggctaggatgaaatacaacttttggtagctcaaaattaagaaaatagcagaatttcttattgttgtagacaaagtaggtgctccatgcatgtttttaaacaagtagggccatgggatttacatattgtgttctctgcctatactgctaatttaggtcattcatttaacaaatatctattgtgtgccaagtatgttcagagtacttttttaagccccctgagatactgaaatgaatagcataagtatcaaaagagaagttaatcacagtgtagatttagtacctatgggaaagagttgttaattatgactgaagtggatccatagataaggcagagttccggctgggttttgaagaagaaaaaaaatggtttggataaaatgggaagacctgaagtcaggagcttacagtaatggtctgggggagaaattatgagagtattaactggagcaggggcaatgggaaagaaaagggggaagaatcaaaagttgcataaacaaaataatgtacagtccttggtgatgcaaatgtgaaagtcaagagaaatcacaagtcaaagtgggtttgatatttctacccaggatacttaggaggttggtgatgctaccagaaaaaaaaaaaaaacccaccccaaaacataggagcaatatgtgtggggagtagataagggttttagagatgtcgagtttgaaatgcccatagtgtacccaggtagagatgcccagtgcttagcacaatagccagcatgtgataggttttggggagaacactacacccttactccatatatttccttttatgagaagggatccccaccagtgtcatctttttagcctctctcttcctccctctttcactcttcctgagagaacaaggaattaatttatctgattgatgagtatattaggagcagctggacataagtagctcagctcctcctttttctttttgtttttgctaactctcaggaagcccgtgtacattctgctgtgctcctgcaggccgtcagttgttcaggggtagaatctgctcctgcaggagacttgcaccagtctggttctgtctgacagtggggagtctcggctgtagcccacttgcctaactacaaagcctcattctctattaacatattttcagcactaaaggtgatattttgatcttccagttgccttatttttttgtccttctctttaattggttcagagctaagctggggaagaggctgttatttattggacttctttgaaccccaatagtaggtactcagaaatatttactgaataattatgtttttaaatgacatatctagcagcaactggaaatctagatgtggaactcaagacagagttcaaactaaggaggtagacttggaaatgactagcatgaaagtgatatttattaggcttgagtgatgttggctttattgtcgtttttacagccagtacttatggagtgcttattataggccagacactgttctaagtgctttgcatgcactaactcattaatcctcataagaaccctatgaagtaggttattagtattctagccctatttatagatgaagaaactggagcacatacattgagtaacttgcctaaagtcacacagctggtaagtgacagagctgaaatgaaataaaagagataggattgtctagggaggaaattgagcaaaagaagtatgatttcatttctttacatctaccattctctgcttcagaatgagaataatacttcctagacactttatagtggtatgatgaaagctaatgtaatgacgtggatcctgtaaagatcactgcctggagggaaaatgcgtctcaagccaagaactggccatggctgtttgtttagcctattctttatttggtaacccataacaatctcttattggtatagtttttcattcggctgagtgttcactggagtggaccacagaatggaattttctttgaagaaagagaaagctctacttttaagccagttacggagaggtgggcaaaggggtaaaaaattgcctgaattaggaacaacttgttctgtttttcaggtacttttctttgctaaccagtcatgtgaagaagacatccagcttctcctgtatgaccctaaactttttctctcacttcacagaatcggagatcaaaaggcggagtcacctacagctgctaaactcaaaggcttctctgtgtgtctcttctttctttgccatcagctgggcacttctgcctctcagcccttacctgatgctaaaataatgtgcctcggccacaaaaaagcatgcaaagtcattgttacaacaggtgagattaatcacaaatagtgtgggatattggttctgtgggtgcttgtgctcctaatgagagtcggatagccttcagcatcagccacagaaagaaacatttaatgacaccagggctgtgacattatttccactagtactgggaaaggtaatcatttgttaggtcagcaaacagcatagacttcattgacagacccataggaaaaataacatacaattcaagtatttatgtaaattcaaataccttttaagttactcagtcatcaatgaaggcaaaataacttattgaagagaaagagatatttagccctgagtaattaccctggattccactgttatttataaagcatatcatcattcacataaaacccctccctgcccttccagccggcccctgtggacagttggcagatgactcaccaactagccctcctgctgagatttccttctcacttcagtcctctggctccaattattgttaggatatttccttttgaatattcttctgcatatgaaatgtgtataaagctgagatcatgaagttccagtcgatactcccatattactcagtggcatccccaccaagcctccagggttacagcctcagagctatttttgtctcccctctgtcccgcatgtcaatttcttatcaacccctacctatcacattttcccctgtgttgcctctcagattgaccctaatccagccttcatcatctcacaccccgactggttttgaaacactgtacctgctccttcctttccctgttttagctgataggaaacacggtgccagaatcgaagtattctgaaacacgatttcatcatagccttcctttgctccagagcctaaagtgactctctgggcataactatatcgaagtcaaagtcacagaagcatacctacccaccattactacctaccactactgctgcctaccactacctgctaactaccattactttctggtcttgctccctccctcactgtcttttcctggaaatcttctctactctgtggcaatttatacccactacttcctttatccattttaggaaaatgcttcctagcttatatcccacctccccaagagtctttgtattttatatcctcttggcatgcatgtatgatttatgtcttacactctccagggtacatgtattccttgcctacattgctaagtcctcagaggcaggtaaagatctgttgatctgcttcttttcattctttctcttgttctccaagatttcactatagtgcagtgaacaaaggagattctttgtaaggaaacccgccagttttcatcatttccaatcctccacagttgtcagcagagatttccctaaggaaactgtcccttgggaatctcactagtagagtgaaaagcacttttttctttccttgattccccacaacactgcaaatgagtgtttaataacctgcaactaaataatatgtcctatataacatagctgactcatctttaccttgtattcccttagagtaataatttacagctttaaaaaaatatccacgacatacatctaatggataatgttcacatgcagcacacgtaggcttatatacaattacccagttagctgcagtccacctctttctccctggcaccatagaggaataaccataaatcaagtagattttttaaagtaaatgagtaaggctgggcatggtggctcacacctgtaaccccagcactttgagaggccaagatgggaggactgcttgagcccaggagtttaaaaccaacctgggcaatatggtgagacccccatctctacaaaaaaatttaaaaattagccaggtgtggaggtccacctgtggtcccagctactcaggaggctgaggtggaaggattgcatgagcccaggaggtttaggctgcagtgagccaatgtttgcaccactgcactccagcctgggcaacagagtgagaccctgtctcaaaaaaataatgataaaagtaaatgaatagaacattatttgagacacacattataatgggtaatggcattttaggccacacacactccctggttaggaattgaggcagaaaccacctttccacctctattcaggagcctgcccagactcctctcagttctcatttactataaggacccatctcttctcttccttgagactgccactgggatgataccccgttaaggagagattcaagccatctctttttccccagcaacccatgggaccatgtggcctcaatagaacaacatcaaaatactgaaaaataagcccctttctaaacaagagatacaccacgcagtggcagggaagctctcagttctcaataattgttttgtgaatggctataatggtatcttattgctgttatttccacaatcccagggatctacagaactatttcaccaccagatatgacctagttttatatttctgggaggaaatgaattcatatctagaagtctggagtgagcaaacaagagcaagaaacaaaaagaagccaaaagcagaaggctccaatatgaacaagataaatctatcttcaaagacatattagaagttgggaaaataattcatgtgaactagacaagtgtgttaagagtgataagtaaaatgcacgtggagacaagtgcatccccagatctcagggacctccccctgcctgtcacctggggagtgagaggacaggatagtgcatgttctttgtctctgaatttttagttatatgtgctgtaatgttgctctgaggaagcccctggaaagtctatcccaacatatccacatcttatattccacaaattaagctgtagtatgtaccctaagacgctgctaattgactgccacttcgcaactcaggggcggctgcattttagtaatgggtcaaatgattcactttttatgatgcttccaaaggtgccttggcttctcttcccaactgacaaatgccaaagttgagaaaaatgatcataattttagcataaacagagcagtcggcgacaccgattttataaataaactgagcaccttctttttaaacaaacaaatgcgggtttatttctcagatgatgttcatccgtgaatggtccagggaaggacctttcaccttgtctatatggcattatgtcatcacaagctctgaggcttctcctttccatcctgcgtggacagctaagacctcagttttcaatagcatctagagcagtgggactcagctggggtgatttcgccccccatctccgggggaatgtctgaagacaattttggttacctcaatgagggagtggaggaggatacagtgctactaccaactagtggatagaggccagggatgctgctcaacctcctaccatgtacaggacgtctccccattacaactacccaatccgaagtgtcaactgtgtcagggctaagaaaccctggttttgagtagaaaagggcctggaaagaggggagccaacaaatctgtctgcttcctcacattagtcattggcaaataagcattctgtctctttggctgctgcctcagcacagagagccagaactctatcgggcaccaggataacatctctcagtgaacagagttgacaaggcctatgggaaatgcctgatgggattatcttcagcttgttgagcttctaagtttctttcccttcattctaccctgcaagccaagttctgtaagagaaatgcctgagttctagctcaggttttcttactctgaatttagatctccagaccctgcctggccacaattcaaattaaggcaacaaacatataccttccatgaagcacacacagacttttgaaagcaaggacaatgactgcttgaattgaggccttgaggaatgaagctttgaaggaaaagaatactttgtttccagcccccttcccacactcttcatgtgttaaccactgccttcctggaccttggagccacggtgactgtattacatgttgttatagaaaactgattttagagttctgatcgttcaagagaatgattaaatatacatttcctacacca

SEQ ID NO: 5 - DNA, 35737 bp, Homo sapiens
caggaaaaacctcaacctggggcaaaaacgtggtagagcggaaggagaagttaaggactgagctgctttgcagatcacagtgtttgaaagtgaacagccaacctgacaagaagcaaaaaccacagaacagagtaccacatcgtctttctgttcactttttttcacaaaatcatccaggctcttcctactctcctctcttaccacctctctcttcttttttttttttttttagttatttcacagatgccactggggtaggtaaactgacccaactctgcagcactcagaagacgaagcaaagccttctacttgagcagtttttccatcactgatatgtgcaggaaatgaagacattgcctgccatgcttggaactgggaaattattttgggtcttcttcttaatcccatatctggacatctggaacatccatggtaaggcacctgcttaggttatttctggttttatttctcagggggtcttggaggcaacattctcccttgctgaacttagtacggtgtaacgtttatacgaagtgggtaatcgtagatgaaaccaagctgttacatttgcttaccgaagacatcgtagagcataaaccaaattagaacatagtattcacctgcctaatcataggcatcgcatcaatagcttggctgactttcttaaaaacatgttgatggtaggaaaagagaactgagtagatgttataaatagttaagtacaaatctatcactacttcttgcaaaaatgctctggctgccatactgataatgaatagatagctcgttctttccaaactgagtgcagtagagtgctgcagtgctcagttgggtaggacagttgttggataatcggaattatacatatctccatggttaccctcaaataatattacctctaaataaaatctctatacttgcttcattgggatgtatgccttgagaataccgattgagaaaatgctacaaaatataggagcagaacttttcgtcattgcttctattttgttgaaagggaatggttcctacttggttgtcaattgaacacagaaaataagttggattctgcaaagatgatatttagccacccctgcaaagactttatacaggcaaaaaaaaaaaaaaaaaaaaaaaggcaatttcttttttattgtaaagtcgcttcctaccttatattgcataggaacccacatattatcaagaggaaaagcctatgagtggctcatcagaagcttctgatttttcaggttttatttttttatttttttgagacaagagttttgctctcgtcacccaggctggagtgcaatggcgtgatcccgcctcactgcatcctctgcctcccgggttcaatcgattcttcttcctcccgggttcaatttattctcctgcctcagcgtccctagtagctgggattacaggcaccttccaccacgcacagctaatttttgtatttttagtagagatgttggataaccccaattatccaacatctgtcctacccaactgagcactgcaacactctactgcactcagtttgggaagaacgagctatctattcatcatcagtgtggcagcctgagcattttcgcaagaagtagtgatagatttgtacttaactatttataacatctactcagttctcttttcttgccatcaacctgttttttaagaaagtcagccaagctatggatgcaatgcatgttgggcaggctggtctggagctcctgacctcaagtgatccacctgcctcagcctcccaaagtgctaggattacaggtatgagccaccatgcccagtgatttttcaggttttaaatattctgtcttattattccctacaagcacacatttatcagtttggctactgcaattttaaattagaaaatctggccactgaggttctatggaaagtctatctataattttaaactgtgtagtttggaatatgtctctatgatgccaggatgccacacaaccaagtgcaaagtaaaaaagtccttagttactcaaacatctttatgtttgtaagtatctagtattaagtcaactaggtgcttagatggttgactgaattttccaccttccatcagatgcctacagtcacatagctacaactggagtcaaatattattaaatagatttcttccccatttgaaggatacataaactactctctatgaaattaagaacaatgagtttcagtgctaaaccacattgatggtggggtaagacctttatttctcccaatgtgcaacctagcatttgcaaaagtgaacttggctgttagaactgggttaatttactggctctgccacttactgtatggcattgattaagtctcttctcttctctttagtttcctcatttgtacaatacaggtaataattgtacctaaattatggggctgctgtgaagactgtagatgcaataatatgggtaaagtgcctcgcatagtaagtgcacgtatttaaagctcagtaaatgttagtggtatttttcctaaattattttcaccatgcaacctctatgtaattaaatgagaattatgttttaacattattatttaaaatagttgagtttttaaagttaaaaataaaataaataagtacaatatattttgcaatatatttagcccaaaatatagtgaatcaaattattcagaaaatgaaatatggctgggagccatggccctagcctttagtctcagcactttgggaagccaagacgggcagatcacctgaggtcaggagtttaagaccagactggtcaacatggtgaaaccccgtctctactaaaaatataaaaatttgctgggtgtgttgggaggtgcctgtagtcccagctactcgggaggccgagacaggagaatagcttgaacccaggaggcagaggttgcagtgagctgagatcacaccactgcactcaaaaaaaaaagggaaagacttgagtgaagtactggtcagatatataccagttgatataatggattgcagcagcagttgcattaaattaaagctataggttaagagaaggaacatttggtgaaatttgttctcccaggcagagctgatggctccatttcttaaaaccacattaaataccttatatcttggggatttcctgtgatttacttaattgctgagttctttacagtaatacattttcagtgtttaaagatagcctttgaagattttttccccctacttcaaagcaatgtgagatccgtgtccttgttcctaggagtgaggctgcatatataataaggctggaaaaaatgtaatgttctctacaaacttcctgtttaaggtccttctttattacaaaagtatgcttgcttactttttgtgtttctctaaaaaattagagaaacttgcccctcagtgtgtggcatacagtttctgtcctgatagaagtaataaaaatgtcaatatcttcccttcatgggcagatcatgctggcaagatctagactgcaagtggaagtgtctctgtccattgcctgccctgtcatcctggaccatttgtctgaggctgccctagaccctagttcagttgaggatcaaccaaggattccacttttaggcaggcaggaacactgcagttaatgtctgggtatcaccaacaccatatatgatgcagaataaaggcagttggaactgtttgattgattactggttattgtgatttttaaaaaaagcaatcctagtctggttcagtaagggaaagacacctgtattctggctcttttgagaatacagtggttagggctatgtctccattttggtctggcttgtgtcatttttttccctttattatgatggtccagtatggtccatggaccagcttttaaacaccgtgttccacatcccacacagattgttttgctctactacaaactggccatatctttgggtcaaaaaatatcattccttgaagttcaggttttgtagcacagtatctttataaggcatatttctatggcttcagctatttgttcttattgaaatgtgcatatggaggaatgctagagatagagctctgtcttctgccaagtgcctatgtattgttacaacaatgcctgccatatattaaataaatgtttaggaatgcattctgtggttacaggacttcttgaattaaagcatgaaaagattaaccttgtgctcattgcagccttgaatatacttttcctatcacagagaagtttttaaatttcttgcttcctctgtcctactaccaaagtttcctctattgtaaagttgacgtcaaaactatttatcttgcctcattgggactttcctacttaatttccattatttgtgagtttcatctttatgtagagttcagaattgttaaaagaaaaatatttacaggcatttgtaatcaggtccaaaaaataatcattttcttttttccttggagaagctgtgtggtatagtggctaagatcagggactctaaagccagactccatggattagtatcctatgtctgccatttaatggttttgtgactataaaatctctggttctcagttttctcatctaaaaaaatgggagaataatcttataaggttgttgtgactattaagtgaattaattctgtaaaacacttagaatagtgcatggcatgccattcagtgctgtgtatatttagctaattttttttcttttagtccaacatttcattagtttaatagtcctgttaaagtaacattgggtgacaattgggaatcaaccacaaataaaaatttggagttcacaaaagtcttctataaattactcttgatattattatctactcttttttttctttatttcttctaaaaaaggaaaacaggatacatgtgcagaaatgtacaggtttgttacataggtatacgtgtgccatgatggtttgcttaacctattgacccatcctctaagttccctctcctctccccctactccccaacaggctctggtttgtgttattcccctctctgtgtccatatattctcattttcaacttccacttatgagtgagaacatgcagtgtttggttttctgttcctgtgttagtttgcttaggatgatggcttccagcttcatccatgtccctgcaaagggcatgatctcattcttttttatggctgcatagtattccacggtgtatatgtaccatattttctttttccagtctatcattgatgggcatttgggttggttccgtgtctttgctattgtaaatagtgctgcaataaacatacgtgtgcatgtgtctttatagtagaatgatttatattcctttgagtatatacccagtaacgggattgctgggtcaaatggtatttctggttctagatcgaggaattgccatactgtcttccacaatggttgaactaatttacactcccaccaaccgtgtaaaagcattcctaattctccacagacttgccagcacctattgtttcctgactttttaataatcaccattctgactggcgtgagatgttatctccttgtggttttgatttacatttctctgaccatcagtgatgttgagcttttattcttatgtttgttggtggcataaatgtcttctttttttttttgagatagagtgtcgctctgtcgcccaggctggagtgcagtggcgcaatctccgctcactgcaagctctgcctcccgggctcatgccattctcctaactcagcctcccgagtagctgggactacaggcggctgccaccacgcctggctaattttttgtatttttagtacagaaggtttcaccgtgttagtcaggatggtcttgatctcctgacctcatgatccacctgtctcggcctcccaaagtgctgggattacaggcgtgagccaccgcgcccagccagtgtcttcttttgagaagtgtctgtttaggctgggtgtagtggctctcgcctgtaatcccagcacttcaggaagctgaggagggcgggtcatttgaggtcaggagttcaagagcagtctggccagcatagtgaaaccctgtctgtactaaaaatacaaaaattagctgggcgtggtgggacacgcctgtaagaccagctacttgggaggctgaggcagaattgcttgaacccaggagactgaagttgcagtgagccaggttgcaccactgcactccagctgggtaacagagtgagactctgtctccaaaaaaaaacagagagaactgtgtgttcatatcctttgcccactttttgatgcggttgtttgtttttttcttgtaaacttatttaagtttcttgtaaattctggatattaggcctttttcagatgggtagattgcaaaaattttctcccattctgtaggttgcctttttgctctgatgagagtttcttttgctgtgcagaagttcttcagtttgttgcaattgcttttggcatttatgtcatgaagactttgtgagaaaaatgccaaaagcattatctactcttatccttggtcaccaagaaaagctaatagtgcttgagaatcatgcgcttgagttgtattgtgtcagtgaattgtatcatatgcgatttgcttcacttttctaatactctccattctcttacctcaaaataagctcaatattttgtacctttctggtatactctcatggttatggacctgatttacatgtttatctcaatggaagaagtggcttgtgtgcagcatgtgtctgtgtgtatgcatgcagaggtgtcatacaatttgagattcacttagaacagagtccagaagagtgttagatcagtcccaggaaaacatcaagtttagctggcagagctctttaatttcttttttctgccttcttgataaccatgttcatcttataagcacaacctggaactcacacacatcacaaatggcctattatccagtatttggctacaagggaggctggggcattgagatttttatctggggggttatggccccacttcattttcctctataatattagaagatgagaattaatattggaagacatttagcagattctgtccacataagtattgtttagtatcttcaagggctttgaaaatgccagtgaatctcagtgtgatgtctgtggtagaatgtattagagatgtgaggaagtatctgggaagaaagtagagatggactttccctttccaatcataatacataagccacacttaatctgaacatcacaagtaacaatccttccactgaagtcaatatttagaaatactcatgttggtttctgatcaaatgccagaggcactcactgatgctactgtcaacagcttctcaggtatgctgtctacatttgctgccctatgtttcttcctgaaatccctgtgacaaaggtggaaaatttagcctctctgaaggacagggcctatgtgtaacaggcaatcaaagtctctctaaatcattgttctttaggactcattaagttgactagaagcttttactattcaagggcgataattacatgttgaccaactaaaaccaccagaaactcatccttgttacacagagtagacagggctctaaggagtgcaatgcatatgaatcctctggcctagagaagcaaagtcagtgaccagtagggtagatctgcaaggggacatttgtgacttggcagagatgtaatgaagaagtcctgaaagcaagcttagaaaattatcaaaggacaaagtttttttcaatattctagttttgaccaaggcaagccttgctggttaatatatttctgtagagtttcctctcccacataaaagaagagcatgcttatattggatgtgctgcctttcttctctctattatatagatatatttttgcctggtgtatatactagttattatgcaccactgctgatccctagaatggttgttgggggtaatttttcacagcagagtcttctgtgtttccatcttgtctttaccattcataggctttacacctctggacaatgactcaacttctgtgtgatttccctaaattcatcctatcagaaaacataataatatctggtactttatgttgttgttatgtgccaagcatagtgctaagaatatttcctatatgttctcatttgctttcacaacaaccctactggataagagcttgtgctttggagttagccacacctgggttaaagtcctagccttgactcttcctcctaccagctggtgatcttgggcaagtggcttatattctctaatacccagtttcctcaacttaaaaaaataaaggccataatagtaattccctcataaaatcattgtgagggtcaaatgaaacaatacatgtttggtatctaaaagtgcctacctcataataagaactttgaaaatattagtcatattctttttttcctcgtgttaagatggatctaggttgggtctacagtatatagataatgtgaggtggagtgtacctgtgggcaagtggcaaagaatgtgtagcagtgattctagaggtgatctcctaaatgtaacttaaactttccattgggcatctgacctcatgacctctaaggttctcttcttgttctactcttaaatatctcaaggagaggaaatgacatggggactttgtaagctttgctaaatgtcggaaaaagcaatgacaaatactagaatgactgattttagacaaaacaagttcagaattatttcaaacatgataaaatcaagagatacagagcttaaagtcttcagtggctcaatacaactgcattgaagagatcagtcttcaaatttacttgccaaatagtcatactacactaacaatgagaaattctaactgtagaagaaattgctttaaagtgtgctaataccatatgaaagtaaacttaaagaaaaatttcataaatgaatataagaagatatgtttttataagaaggggatttttaagaggaaataataataaaagatgattgtgaaaatgctctcaattttcttgtttcatggttgctttttttttttaaataatgggcataaatgtagatttatgccctgtgtattcttggcattaatactttccagttccatttttgtgaaggaaattttacattgtgtgtgtgtgtgtgtgtgtgtgtgtgtgtgtgtgtttacccagggagaaaatggctcttcttgtctaaagagcaatatcaggtgatatccacagagaataagttaaatctactattgcatactacatccttgtctgtgatctgtattgtctatgatctgtatctttagtgttgtttttcaggaaagacatatgtaaataaactttcattttacagaagggactgagggccagtcagttttcactgtactcgtgagaacaatcacagggttttccttaaagtaacaatagtcacttttacaaaagaagctctgattttaacatatgtttgtgtgtgtcatacttacttaattttctccaggtattcctagtacttctgagaatatctgacttatggagtggtttatttaccacagagttaaagtaatacctttaatagacattacataatacattaaatgaatactttctatatgaggtggaactcccccaccctaacctcatgtcaccacatttctgattttgtgagtgtatgtgagctagtttatgatgggaaagtatgctacctgggttttctgatgtcgtccgtgtgatttcccaaggtatgcaagtcaatgtcctcccaagatccttgaagtatggttccatggctgctattgctgtgtgtggatttgccctgactatgtacaaaccactgccttatgggatccctaaactctaatttcaagggaagatttgagagacagattatttcccttccctggtggccatcatctctcccctcctctctaccattccagccttctaaagtaaggcagaacataccatctggatgcctttttgctcctgagtgtaaagacttcattccttctgtagcctccccagcatgcgtctgaagttttggtttgcttgttgtttgtctgtgatagtattttctgatagaagctaaaatcctggttgatgtcacagaaaattattggtttattataccgttagtaatcattttagtttctcaaaaaatcatttgtttaatttctatgttaaactctgacactttcttagctcaagttaaggcaatctgcattcattacagtcattcatttatttgaatggttgcaaccactttgaagtttccataaatttgtaagaatttttcaatggagacatagtgaaactcaggtgagattttcctcatgataatggttataatcaaaacatatggtatttaaaaataagaaataatgatattttataaaatattcataatcataaccctctttttttttaaatggctgattggtttcaaaaattacctactctcttcagctcagcaactacacttgctcagctgggagttacgagactatacagttgtttgtggctggcactcctttctgatcagctgatctgtgtagctggatggccatggagtgtcacttgttaaatatttttaatatccacccctgagtggacataaatcaggccttttcaaactgaatacttgtaaagtctagcttttctttggtagttataacttaaccactgtaaggtatgttgagctgcatatgttcttcacctcagtgccttttagcccacctctctaagggcttagctgtctctgctgtgcaaccagtactacatagaaaggtaacacaccatcaaggaagtagcagactagatagaagacagaaacatgaacacatatgtagttataaagagtgatgcatgtcggctgggtgcggtggctcatgcctgtaatactagcactttgggaggccaaggcgggtggatcacaaggtcaggagttcaagaccagcctggccaacatggtgaatccccatctctactaaaaatataaaaattccccgggcgcagtggcaggtgcctgtattcccagctgctccagaggctgaggcagcagaattgcttgaacccggtgggtggaggttgcagtgagctaagatcgcgccactgcactccagcctgggtgacagagcgagactccgtctcaacaacaacaacaaaaaaggagtgatgcatctcacacaaaatagcatcagacatttgctagggagtggggatatgagggtatggtaagtttgcataaacttactgggctaggcccagtgcggtggctcacgcctgtaatcccagcactttgggagcccgaggcgggcggatcacgaggtcaggagatcgagaccatcctggttaaccgggtaaaaccccgtctctactaaaaatacaaaaaattagccgggcgtggtggtgggcacctatagtcccagctactcaggaggctgaggcaggagaatggcgtgaacccgggaggcttgcagtgagcggagattgcgccactgcactccagcctgggcgacagagcgagactctgtctcaaaaaaaaaaaaaaaaagaaaaaagaaaacggaaactgtgacagtgatgtggagaattgaggtggagggagggaaacaaggccaagtttggaatgtagaagaccatttggtacgctgtgacaataatccacatgaaacagaatgagatccaaattaaggcagtgtcatggaaacaaatatggaagacattttccatcctgaatcaattgaacttcatggctgatggaatgggacggtgacaaggaaggagactaagatggctccccaggttctggctaatgtgattaggtagatgatggtattatactgtgataatgagaggaggaccaaatttgcctgggggttggcttggaggaagaaagagatttatcttcccccatgaagcctttcctgattgacccagccagaaagactgtcttcctcttgagggatctgaaagctctgagagattatatcatatccaaaataatacaacaaaaatctaatggcaaaattgaaaagtggtgtaagactttcagcctcttctttgtgctagaaactgtctcgttactaatgtgtcaaggacagtgggatatccagactcctgggtgtgaacaagtggctccattgtctgtattgaatttaaaaacaactaaaagttgatttcctttttttttttttgacacagattttcgctcttgttgcccaggctggagtgcaatggcacgatctcagctcaccgcaacctccgcctcctgggttcaagctattctcctgcctcagcctcctgagtagctgggattacaggcatgcgccaccatacccagctaattttgtattttttaatagagacagggtttctccatgttggttaggctggtctcaaactcccgacctctggtgatccgcccgccctggcctcccaaagtgctgggattacaggcatgagtcaccacgcccggccggtttccttttaattatcaccacatactagcaaacatgaacaatgtcagaggtgaaatatttacccttcaaaatatttttggtctaagttctaaatactatggttactgttgagttttatgatatatatgtaaacttcaaattagcacatttgtagtatatatcatttgacaaacattgcattctacttgcaagttaactcagagaacttcccagttatacagctggccttggacatataccattcagctacttgtgttcattttgatagcaaatttataaagtccaggatcactccagtttcctccaaggacactttgtgtcctcatctctgtggtactacatactccagcctttcaacattcaattttaaataaacaataataccacagagaatgctgagacaaagaagcagaacaggagctgtttcatttttgtcatttggtgcaaacttcttgaatttttatttgtgtttaaaatttaaaacagtgaaaaggatacaaactgtgatatataaaatcttcggcttggcaactttatttcatgcataaaatgttagattgattaatatttttacaattgaaatttttttaatgttgttttaaaactaactttagaaaataaaactttagtgttacaatttagtagttacctaaattgtatctttgcagaatttcagttttaatacaatccatttattagttattggacaactatttacataaactattatatcagactataactaaagaatcaaagttcatactgtttaggtggatataaaaatgattgaataaatacctgtgcatttttctttttttgtattttaatttttttaaaacattttttcatttgtatggttttatacatgaagttcagcacaagaaaatattcattgtctatatttcttttctggccattttattacttgttttatctcatgattatttctgaaaatatttttatgtatagagaaaggggttgctcaaatgatgtactctagacctaaaataaaatatcatcggtaccacctgatcgtggaatatatataccactagtggttttgataaaaattttaaacatgaaagaatttctaaacctatagtgacttaacaagggatatttcattatataagagcctgggggggagtagaagtttttattctttgtttgttggtttgttttttgagatggactctcgctctgtcacccaggctggagtgcagtggcgcgatctaggctcattggaagctccgcctcgcgggttcacgccattctcctgcctcagtctgccgagcagctgggactacaggctcccgccaccacgcccggctaattttttgttttgtatttttagtagagacggggtttcaccgtgttagccgggatggtctctatctcctgacctcgtgatccactcgcctcggcctcccaaagtgctgggaccacaggcgtgagccaccgtgcccggccagaagtttttattcttttactgcatgtatttattttaatcatttttagcattgaaaatttcctgtcatcagatatgaatgcttgagaaaaacagcagagataataagagcaggaataaaaataactgatggttccggctacttgggaggctgaggcaggagaatcgcttgaacccggggatggaggttgcagtgaaccgagatcgctccattgcactccagcctgggcaacaagagcaaaactccgtctcaaaaaatacataaataaaaaatgaaatcaaataactgataattggaagttgagtaacagccaaaagcaactgtgatagttattcctcttcgggaaatatttatttgataagacaaacttttgggggatagctttgtgtgtcctaagtatcataagatggatatgcataattcagaacaggcagaaaaggggtgttaacaagcttgtcagatggacaattagaattgtgctatttgtcggccaggccggtggctcactcctgtaatcccagcactttgtgaggcagaggcgggtggatcacctgaggtcaggagttcgagatcagcctggctaacatggcgaaaccccgtccctactaaaaatacaaaaattagccgggcgtggttgtgggtgcctgtaatcccagccaccggggaggctgaggcaggagaatcgcttgaacctgggaggcggaggctgcagtgagccgaaattgcatcactgtactccagcctgggcaacaagagcgagacttcatctcaaaaaaaataaattaattaaaaaaaatagaattgtgctatttgtctcagtgtgtcatttttacactacaaacatcagtgttagcctctgagagataggaggtattataataccttgtttgtgcacagagggagtactcttgatttctaatgcctgcttgcaagcctacattcatcatcggttcattcctccattcaagaaaaattcctgtgccagtcagtgtggttgtcaatgatcattatcctgctgataagaatatttaggaactgcaatgtttccataatcctattgtgaatcagtgatgccaccaacacaaaaagctagctcttttctccacccctaacccactttgcgcactgctccggagcatacagtcacaaaagacagaacttgaagtgatgtctaattgtgccactaacatcaagtgatagccctatggctaaatagaaaggtaatatattgtgataggaatagaaattgcaggctagaagtggtttcgtagtttcagtcacacattaaggaaggtgaagttgtgtgtgtttgtgtggtcaggggatggtgagttagaactttcctacttttacagttcaatcctttcatcttattttgaagaaactgaggaccagcaaaactgggggactatcaaattcgctcaatgtgttagcatttgaaacagacatgttcaaatgaatagtctcatttgtagctatttccgtgccctttataaatatccccccaaaattaggcattgtattttctcatggtggataagcaaagtttaaactcctgcctaatgcttattccatttgttctgaaacaaccagtggtctccatatcactaagtcagaaaaccatgatccagttgtgtatcaatgatctaaatctatcatgagattcctggtccctaagacttttccgttccatttcctcactcttaaaatacctcctctgtcccatgcactgctctgattgccaaagggctactcattcaccaaggttcagctcaagtatagcctttccatgaagctttgccccggctgaagttaaccttctgcagacccatgcaaagttgtttgtatctttttttttttttttgagacagagtcttactgtgttgcccaggctggagtgcagtggcatgatctcagctcactggaacctccagttcctgggttcaagcaattctcctgcctcagcctcttgagtagctgggattacaggcacgcaccaccacacctggctaatttttgtatttttagtaaagacggtgtttcaccatgttggtcaggctggtcttaaactcctgacctcaggtgatccacctccctcggcctcccaaagtgctgggattacaggcgtgagccaccatgcccggccttgtttgtacctctttacagtgttatataacactctcccaattgccattcatttttatttcccattagaaggcaagctccacaaatgcagacatcctatctgatttattcctaggcttcctaacaaccagcatgcaacgtccctcaaggcttgctttcagctcagtaaactgaaagaaataaagactggtatatagtaaattgattctagaaaagtgtctagaaggtaaattgattctggccaggtgtggtggctcaagcctgtaatcccagcactttgggaggccgagatgagctgatcacctcaggttgggagttcaagaccagcctgaccaacataaagaaatcccgtctttactaaaaatacaaaatcagctgggcgtggtggtgggcgcctgtaatcccagttacccgggaggctgaggcaggagaatcgcttaaacccgggaggcagaggttacggtgagccgagatcatgccattgcattccagcctgtgcaacaagagtgaaactcttgtctcaaaaaaaaaaaaaaaaaaaaaaaagaaaggtgccctctttgttagatactcctggggcttaccaattaaatggtaaactctttgagggtaaaagatctttgtctataaccatctcattgttttttataattctagcacagacttagaggctccataaaccattattgacttatccaagaaaatgaaaagggaagttaggaggctgagggagtctattaacttcagggagaggaacggacttctggaaacaagagtttcacttgacctttctgcctctggccttcttactttttttgtcctaagtctaaccacattcaggtacacttccttttggtaaaatattttaccctttctcttcatttttttgaaaacctcatccttataacttacctttcagtttggtttcattttagttctaaacttttggaagcaactgaattaagaagtcttaaagtgaacttgcttgaggtctcaaagcaattataaataaataaatattaagaggttctaaaagttgtctgcaggtcctttttctcactctgattcctggaaactcaatcaggtttctattattctgagcagagattcatgagatgtgagcaggaagggtttttaagtaggatgtgagtgaaaggtgtattaggtgtgaggaaatagataaaatgagaatatttatgctggcaagggtgtagaaataaggtgaaaccttgttctggatagacatgtatgagaaactcagggtcaaaatttgctccttggttcaacatctgacaagctgtgtgatcacaggcaaggcctttagctgtctttgtatttaaaagagagttttggctatcatctctgttacacttatgtcattctaatgtatgatactgtacatctattcagaagaatgcatgaaaatgagtgaaataaataaatgaaggagatgaactagacattgctaagagagacggtagttcaaaacatagaaagaaaggctaagaaagaactgtaagagtggagaaaaaaataatttaaaagaaaatacttttaggatcacgtgcttagccttaactttactggaaaataaaaaaatacaaatcaacaccaagtgcataactaaaaggaaatgagaaacaagccattggaaactggagtaaaggccattcttgtcatacagttgctaagaacttggtggaaatgtatctatgtcttaggactttacggaaagcagaaattaagagcaataattcaggatatctggtggaagaaatatctaagccgcaaagcatttaggctgctgtgtggctacttttaactgcatacagtaagaggcaggagggaaaaaaatgacttaaaaatggaatttataattaaaagagaagcagaatagaaagatttggaaaattcactgcctagccatataaaaagtgaaaaggcatgaatgggagaaaatactaagggtgtggcctagtgaccattgttaaagagattaatatggatagaagggagtgaagtactattcaagaagttgagaaaaaggccctgaaggcatttcaaagcctttgaggctgcccctcccatcataggctcagagctcagagggcaaattgatttcaggggaaactagaatgccctttacaggcttgctgcccagatctgcctcaggtttctgttctctgaattccagcacagtgctccttagctgctccagccatggctcaagtgagcccaggtgcagttcaacccaccactccataaggtgcaattggtaagccttggtggcacccacttgctaagtgtgcaggctagcagaatgcaagaggtgtggaacacaacttcctccatgtagatttcaaaggatgttgtggacagcctgagggcccaggaagagtccactcccatgtcagtgcctagtagagccatgggagtggactgccactgagaccccagaactgtggagctattagcctgaagcattagcctgggagagctgcaggtaggagtctccaacttgtgagtgctgaagcatcaaccaagcccagcaatgccattttatttctctgttgggttttggacttacttaggaactgttactttctcatttttgcctatttctcccttttggaatgggaatatctatcttatatctgtcctaccactatattttggaagtagataacttgttttgatttacatgatcatagttggagggaatttgcttcataatgaatcgtgccttgaatcttacccatatctggtttagataagactctgaatttagtgttttgaattgattctgcaataaattaaaacttttggggctattgagatggaatgaatgtattttgtatgtgaaaagaacatgagttttgggggaccaggggcagaatgctatggtttgaatgccccctccaaaattcatgttgaaattttattgctattgtaacagttttgtgaggtggaacctttaagagatcagaggttatgaatgtattaatgcccttattgtaggaatggattcgttatcacgggagtaggcacctgataaaaggataaattttggcccccatttttctctgtcttgtgtgctcccttccactttctgctttctgccatgagataatgcagcacaaaggcctttgctagatgctggcaccatgctcttggacttcccagcctacagagccatgagccaaataaaacttctgtgattcaaaaattatccaatctcaggtattctgttatactagcagaaaacagactaagacagtgtctcatgtgtccgtgtgtagagaccaccaaacaggctttgtgtgagcaacaaggctgtttatttcaccttgcaggcgggctgagtccaaaaagagagtcagcaaatgatggtgagattatcattagtacttataggttttgggataggcagtggagttaagagcaatgttttgggggcagggggtggatctcacaaaatacattctcaagggtggggagaattacaaagaaacttcttaagggtgggggagattacaaagtacattgatcagttagggtggggaagaaacaaatcacaatggtggaatgtcatcagttaaggctattttcacttcttttgtggatcttcagttgcttcaggccatctggatgtatacgtgcaggtcacagggtatatgatggcttagcttgggctcaaaggcctgacagacagaggattaaatgatttatttcattttttaaacatatttattatatgcctaatatgtatgagacattctgctagtaaggcttaattactagaaattggggggttgtttttgaaaattaccaaataatgcttgagaactattgaagtcacatatatatggtacttccagaagaacatatttgattttagttttgtttttatcttttagggaaagaatcatgtgatgtacagctttatataaagagacaatctgaacactccatcttagcaggagatccctttgaactagaatgccctgtgaaatactgtgctaacaggcctcatgtgacttggtgcaagctcaatggaacaacatgtgtaaaacttgaagatagacaaacaagttggaaggaagagaagaacatttcatttttcattctacattttgaaccagtgcttcctaatgacaatgggtcataccgctgttctgcaaattttcagtctaatctcattgaaagccactcaacaactctttatgtgacaggtgagttctcaacacctagaccatctgatatttttcttataatgtttccaggaagaggggggttcagtttctcaagtgattatgttagaaagccaactcctatagcacatctgaaatctgctacacctcacagattgttatgtgccagtgtgtacatatgtgtgtgtatgtgtgcgtttgaggtgagtgagatagaggagagtagagaaatagatagtaaaagttattgtttttgactttagggattataaaatttatttgataagtccaaaagtagaccactgaaatattgaaaaaattataaagtgaatacctatagttgcgaatagctctgtgattgcttgtccttctttgttgttttttttttctctttttcccatttttctcttctttacttttgttcattacaatttcttgaagttatgtttgtggtgcttaggcaattaaacacttcttaatagttcacagtttgtttagaggaaaaacagcaaacaactaactgacttcctagtgattttctgggaatattcagagcttcatctctcttccctgttccccgaaagaggcctttaatatgctttgacaactgaggaaggacagatagaagttaagcttggggaaaccaagctgaataaaacatgaaaaaatacatagggggggagtaggtaagagtaaaaaatacttggtttataaaaattttatagccaacatcatattcaatggtgaaaggcttagagctttccccctaagaacaggaacaagacatggatccttgcttttgccatttccatttaacattaaactgaaaattctagccagagcaaacaggcaagaacaagaaataaaagatatctaacttagaaaaaaagaagtaaaactttattcacagatggcatgaacttatgtgtagaaaaattcttaaaaatttgtttaaaactattaaagctaatacatgaatttagcaattccacatgatacaggatcaacacacaaaaatcagtgatatttctatacactagcaataaacaatccacaaagaaaattaaggaaacagttccatttacaatagcatcaaaatgaataaaatatttaagtacaaatttaaccaaagaggtataagagttgtacactgaacaaagaaagcatggctgaaagaaattcaagaatatgtaaataaatgcaaagacattctgtattcatggactgaaagatgtaatattgtaaagatagcaatattccccaaggtgatctacagattcaatgcagttccactaaaatcctaacagctttttgttgctattgcagaaataaaaaagctgatcctaaaattcacattgagttgcaacagacccagaattgccaaaacaatcttgaaaaagaacaaaactgaagctaagacttccctatttcaaaacttactacaaaatgacagttaaaaaaaaaaaaaaagaatagtattgtcatggatagacaaagagatcaatgtaaatagaattgagagtccagaataaactccatacatccgtagtcaattgatttttgataagggtaccaagattattcagtggggaaagaatagtctcaataaatggtgccaggataattggatattcatatgtaaaagaattaatttgaaccctcatctcactccatattttaagcaatcaaaataagtcagacatttaagtagaagagctaaaactataaaaactgcattatataaaacaataaaactctgatttcttaggagaaaacatagggataaatgtttctgatcttggatttagcagtgttttcttagctatgattacaaaagcataatcaacaataacaccaaaaatagataaattggacttcataaaaattaaacacttctgtgcatcaaaagatactaaaattcaacaacaaatagactggcaacctaattttaaaatgagcaaaggacttgaatagacatttcatcaaagaaaatatacaaatggccaataaacatatgaaaaaaatgctcaatgtcattagttactggagaaatgcaaatcaaagtcacagtgaaaacccacttcacacccatcgaatgactagaataaaaaaaaaaaacacagaaaataataagtgttagcaaggatgtgaagaaatagaaaccctatccattgctgaggagaatgtaaaatggtgcagtcactttagaaagtggtctaacagttcctcaaaatcaaaagataaaacctacttgtcacagtacccagtaattctattcctaggtaaatactcaaatgaaattaaaatatatgttcacacaaaaccttgttcctgaatgtttatcacagcactattcacaatagccaaaaggtagaaacaacctaaatgttcagctgatgaatggataaaggaaatgtagtttatccacacacggaatattattcagtcatgaaaaggaatgaagtactaatgtatgctacaacattgatgaacctcagaagcattacgctaagtaaaagaagaaaaaggttacatacaatgtgattctgattatatgaaatatccaaaataggcaaatccatagagacagaaagtagcttggtggttgccaggggctgaggaaataaagaatgtgacatgactactaaataggtagagggcttccttttggggtgataaatatgttctgaatctagatcgtagtcacgtttgcaaaacattgtgagtatcttacatgccatttaattgtacattttaaatgattaaattggtaacttttatgttatatgtattttaccacaataaaaatatatttggatcaaagaagagtgccctttaattataagaaataatgtggagtttcttttgttgctcataaattgacccttaaagttactgggaaggagaaatttcaaaagagggttattgcaatagcagcatggctgaactctggatgcaacctcgtacagtttagttcctttatggacatcattcacttgaatgcatacattttacaactgatctttttaaaattaatttgttactttatatgcttacttttgagtgtctttcaactcccttaaagtagcccagtgaaggaatccattgaaattcttttaaaatgctttaggttagtttaaaatttcttacagcagcaccatgaaaaaatgcatagcagtttagcagtagctacaaccctcaattatgaaatatagaagaaatcgatggcagagttagggactctgcttttgcaaatatagcgtgaagctcggtgctagttacttgtgaccatccatgcactggcttataaacctcttcaggatggaagctgtgtcttaaacatctttgctctgtatgatggatggcagggtacctggcacatggtaggggctcactaaatatttctttgtaaatgaattaaagaacatagtatatgcaaagcacaaaaattgtcttcatcaacctggagaaggctatattaaggatgtatggaatgaacactttctggaaagaattgcattattaattcacattaatgagacaaaatattgaatttttaacaaatactattttttaaacaggtaaaataaattacaaaaataaggaaaatctgcaaaatattaattctagaatgatatatactattgaataaataagtgctattaactaatttatataatatattaacataatgtataataaaattaaattttgaggcattgagtccaccttccttggaagagaagccttgtgtaattcagtctttctttatgggaactaatctacttctatacgagacatgaatttagccaaggtcagatgaaaggtcagaagttaataattaattgtgatacaaaagtctgttacacaaaagtagcattgcaatttctgctctatcccatatttgggtcattcatgatgactaaagataatctgtagtttgtaaagtgcataaaggtgcctgttctagggatcaagttggggctgagattaggatcaacaatctatctattttgtggaggaaagaacccaactttaggggaaagggaataacattccctcctaaatcctgtgccttggggggttttatggaacaaagtatgtgaagtatgaagtggtgaaagagaaagtctaagagctaaataggagacatgaagggccttgtcagtttctttttgaacatttctactctcttagtttcctactcacctatccttcctatcactcccttccttatcagtttgttaattaatgctcttgatcctcatggaaaatcccagagaattttctttggcttcctactcttgtctctccacaacattccactctgtgatgtgtttcctccaattgcttctataagcatctcgcaccatcattatcttccttctaaataattccaattaattctatgattggactctttgtctttagtatttccccattttggtcaatttcagccaaatacacttaaattacctcatacacttccttcataacaacactctcttgcatagcatccccagtggtcacaatattgggctcatctttgttaaccagcattcaaagtcttccacagtttgatcccaccacctttctagattgtttctggattccatatacagcctctcaattgcagcctgacggccttacttgccataaccacatctccatcattgccctgtgtatgctgctcttgccacttgtagagcacccattcatctgtctccacctatggaaattctacccctcctttcaatctcagctaattttccaagttcttaaggaagcttttcatgatcacctgaggggaagggatcactcctttttaccaatttttatgccatttaagtctgtgcctctcatttatcatttcctttcactgtagtaatgtgtggaaatgtcttttaggtcccatgaaagattataatgtcctggaaggctggaatttgtgtaatatttcttttttttttttcttttaacttccttcacaaaaggtaaattgtttaggaattaactttaatttaaactctgtgtggatttaaaactaatttaatctaggtgtgcatttttctttagtgaagtggtgaaaacaaaaataacagggagggtcaaagaaaaattccttttccttctgaacctgaaagtgctcagtgaactaagtataaggtgaggagaaaaatatattttggaaatatgtttaaggaccatgcttttcataaagaaattttggaggtctgataaaaaatattttattttttcctgtgaaatatatttccgaagtgattttggacattttcttgtttttataagtgactttcttttgctgtttatgttcaagttaaaagttcatgtaagaacaggactgtgacagagttggggcttggatgctcttgggaaagcactattctcccagaatgaagaaaagcaccttgcacaacaagccaaagtcctaggggaaaagttgacagagctggggaacagcccttgaaacatccattggcctgccacttcacccttcccaaacttcccttggtcagtttcagattaagaacttccccaaggctgggcgtggtggctcacatctgtaatcctagcactttgggaggccaagacgaacaaatcacttgaggtcaggagtttgagatcagcctggtcaacatggtgaaaccctatctctactaaaaatacaaaaaataaactgggcacggtgggaggcgcctgtaatcccaactactcaggaggctgaagcaggagaatcacttgaacccaggaggtggaggctgcagtgaaccgagattgcaccactgcactccagcctgggtgatagagcgagactccatctcaaaaaaaaaaaaaaaaaaaaagaagaagaaaaaaagaacttccccaaaatgtgatcattatctgtggcaggaaagtgggtgtggagtgagagggcaggaagtccttgtgggcttccaccctgatttggagcacctgctgaatgtgcctcttcttattccaggtgccagagatatcattgtgcagactatactgtgtccttatgcttaaggaatggggaagaggtgatcaaagcagacagacaaagattgcgttgtatttacagtctttcagtgagcttcaaaataagcccagatatttactttgtgtcaatgatcgtggggttgatgttccacaaattgtgcttactgatcttgagatagattgttggattctctggtagtgtgcaaacactggaatcctccccaaggctagctctggttttggacacgtgagagtacaccctcatcattttctcaatcaatttcagttatttaccttgtttctctatttcagaacaaactcaaaataagttagggggagttttgagtttgttctgaaatagagaaacagtttgttctgaattagttttatttgatcaaactaatcaagtaaaattaaggaaattaggtttttttggtggttaaagaaataacagaagttggatcttcttgatccagcagatctgtttgtattagggtatctgttgtagaaaccttagtccccattgctatccaagaccctcccccaggcagctgtttctggcactcctggcagtggtttggctgctcgctaacctaaacagcagctgcaacatcaatagacaacatttgttaccactctgaataaccaaaccactttttgtgcaacttcagttgcctctaatcatttttaccccaaacctaagcatctagccaaacaaaataacattataatataattaatagaattttttttttgtttgagatggagtcttactctgtcacccaggctgagtgcagtggtaccatctcggttcaccgaagtctccacctaccgagttcaagcgattctcctgtctcagcctcccatgtacctgggattacaggtgcataccacgcccagctaatttttgtatttttagtagagacggggtttcaccattttggccatgctggtctcgaactcctgatctcaagtgatccgcctacctcggcctcccaaagtgctgagattacaggtgtgagccaccaggccagaccttagaatatcttactccagtatttttcatactgtgttaactgtaacccaaaattaaaaaaaacaacaacaacaacaacaaccagatcttacatcacaacccataatgcacacaaatataaaaaagtttcataaggtcatacttaaccataagacagagtttctccattgacactttggtctggataatgttttgttgcactaagtgggggttgcatcctgtatagtgtagggtgtttagcagaatccccggcttctactcactggttgccagcctccctccccctaccttgttacagccaaaaatgtctccagacattgccacacatgttccctgcttgagaaccactgctctagtgtgtgtgatgcattctgatgatttctatcctcttctgtttcattttttaaaatgctatttgtgacatactaaattgtttcacaacctgctaatgagctgtgaacaactgcagacaaacagggcctcaatgcgtattaacattgatcaatagtaatgcgcattagctgtgtgccatgcagagcacttttaaggctatcaaaagtatttgatatttggagattctgataagttacgagacaaggaaaggacattgtgttgaagaaacttgaatttcctgttacaaacatgttggcttgagttcccattgccactcactagctatctgacttggagcaactcttgggacaaaataaagacaatggttttcctacttaagtgatgaatatgagagttagatactgtaaatagaaaggcttaatgaagtaccttctgacagttatcatgaagattgttctgtggaagattaactctatcagaataaagaatttctgcaaaagataaattatcgcagagccacgtctgctcagcaagaaagcaagaggtggctgagggcactgggattcttgaggaatgcctctgaaggggaaatggaggcattggcctgaaatctccttcactcaagttctgacaatgcagaggggtgccgctgatcccaatatatctcagatttcctaactctctttagcatttactaacattccagatgtaaaaagtgcctcagaacgaccctccaaggacgaaatggcaagcagaccctggctcctgtatcgtttacttcctttggggggattgcctctactcatcactacctgtttctgcctgttctgctgcctgagaaggcaccaaggtgggttctattttccctctgcccccagtaccacacatttggggccattcttatttctggggctaaaggatttttagtttcttcctgttgttttctttcccaatcctgtaaaccatggataatgatttcctagaagacaactcatatttgcgctaaaaagctaaataggttggttggggctcccttgagtcacgggagaggcatgctcaccacgcacagtattccagctagagttgtggcgagcatagcacattgctgagacttcatcattctctttgcatcaatcttaggtttgtgtgagaaagagctcttctaaaccttaacaggattggaagttgaaacaatctctcagatcaagatatctgctttattttgtattatcctcttttcacagccacaccacatcatgccaatcccacacacacccttatgtaactgaagaaccaatgtccccagagaaaattaatatgtctgtattttctattgccattataaacatatgcttgacctgaattcttacccaacaataatgcatatgaaaaatgtgggtttggctatgatgggaatggtgtgatattttgaaaataattcctttctacttttgcaagaactctctcaatgtcatgaccaaatatgttaagtaagagaggaaagcatagagaattctgatctagctttggcctgaactacttcagttttctctttcctttttcttctcctccatcctctcacattcctgttttcacaacaccagctacagtgtagctatagaaactgagctagatagagcaacacttattctgtgtgacacaggaataacctttgactgggcaaaagtgcttctggtattttggagtgagaacttctggagttcagaaccttctctggattctgaagaattctctcttaccccaattcttcatctgcaactccatggctctttctatggcctctctgtatctttcatcatctttcttgagactgctggaacctctctcagaacttcagaaaaggagtcagggataaatcttttgatttaccacatccaaagtgaactaggtagtaggagatcttggctacataggtgacaggacagcagcatttctggcattgagtatggaatgtccccagagcaaggacttccagtctcttccaagtgatatactagatccctccccttccttttagatatgccatggggctatgtggactgaaaagtgatgaaccagagagagagctggtcagtgtgaattatcacaaacaagtgtgtgctaggcaaagcaaattaacaagccaaaactaacaacactatccctggcattcaacaggataagcatgggtggcaaggtggtttacttctgctttctttactccttttgattacttctttttctttttgtcttccaggaaagcaaaatgaactctctgacacagcaggaagggaaattaacctggtaagcttgatgtagctgttgaaacaaatgcaatttgtgttatactgtgtttatttatttattcaatgaatttatataacaccatgtgccaggcattattctatgtactatatatatatatatatatatatatatatatatatatatatacatagacccatttttaaaaatgtgaattttgcattctgctctctatgcagcaaagactctttagggttaacaagtctcgtaataagtggttctttggaagttcatggaaggcagtctagatccaagacagaaaagtcagagactgaaccatacaaacttgactctgctcttgcctgttatgtggcttcaggctattcatttattttttatgtaaacaccttaaggtctttctggaagagagtagggagctgatgaaagaatgaacccacaaataacctcataaaatgattagatatcttcataaatagcaccagcaaaatagagacatgatctttggcttagttattacacagaggtccctggcaatgtgtatgggctcatcaaggaagggaccactcagactaaaggaagggaattttggagtcaatctttcctataaggtttggaatgtaaatgtaggcttttcttttgagttgaatgttgtggagatattagaactaaaaaagaatgcaagatgaggcaatatatttgtggaaaagcattctgaagctctctaattaaaactaaacagtcataaatgagatactgcaaaggaacttgatgtgtgtgtgtgtttcaataaggaggaatagtgataaagaagtagtaaccctcttaaaaattccacaaaagacaaaatcgatacagccaataattctatatataatattaaatggcattcaacattccccaccaagctgcttaattttaaaccagaccaaatacactcaacttgacaaacttctattaagttttcattagcatcagtaggcactgtgtagggtgctaaggctttgttccctcaaatagggaaattttcttaaatattattttctttctatagtaaataataataaaaatttcacttgattacaataaggccagggagctatgaaattatttaagataaaaatctaaataatttactgtgcaagtaaaacccaggttggttaagctgtggacattgttcttcctgggtaggctggataaattatgatttgaagcttaattcaaaagggtattttctgtatgtgcaattgtctgggaagtttgttttaaagcgtttttgctattaacaggaatttgaagatttttgccccatttcagttgtctagcatttcagaaaataatcaaaaggataccatattatacccttggggctaaatatttcttaacataaaactagtttgggaactgtggagaaatcaaagtacagaaaggaactggtataaacatgacaggaaaggaactggtacaaatgtaacaggtacatataaaagccaaagctctgatcttaatccaaaacggtcctttgagggtataaagtgcttgcctaataaaaaccactgaattgtacacttaaaagggtgaattttatggcatgtgaattacatctaaacatatactataaatacaaattttaaaatgctttgtatactgtaacctgccataggaatgtaaggtgggattgctgtttctggctttatcatctctatccaccacattgtggtgcattggccttgtggcacccagccactttgacggggtgccacagcaggggtgctgcagagcactatattttcttttgctccattcattttaacaaaatttttcatggaaatgagccatttcttgggatgagagacagggaacccaattgacaggcttaaacagattgaaaagtatcacaggatctttgttgatatattgaggactaaaggctatttttcagttcacttgacagtcttctttagtgtgccacctactgacctcaaccaggctcttttcagtggagttgggagtactttttatcttagccaagcagcctctgcctctttcagtcgctcagccttactgttatttttgggcagccaccacatcagagggtggcactgtatcaggaattcttacatagcttctcagggtaaagccagacatgcttgcatgatagagctctgccaaggaaatctgccatagacatcctactgcacacatcacaatgaggatgacaaaggaccagacaaagtatgttgactttcaaagacagtggacttgataccttaaaggagttaggccagatgtcaagaacggaaatcgatgggcaaaacttgaatttaaaaaactgaaatagcccctagaatgaacacatcttctttgtcaggtgaacctttgtataggtaggagcggctaataaataactgaagagtgagaaaacatcaggactaattttactttttgtttttacaaattcacctctttcttagaagctctaagatatttggctatatttgaaacggtaagaattttcttgccgggagtggtggctcacgtctataatcctcgcactttgggaggccgaggcgggcggatcacgaggtcaggagatcgagaccatcctggctaaaatggtgaaaccccgtctctactaaaaatacaaaaaaaaattagccgggcgaggtggcgggcgcctgtagtcccagctactcgggaggctgaggcaggagaatggcgtgaagccgggaggcggagcttgcggtgagccgagatcgcaccactgcactccagcctgggctataggcaagactccgtctcaaaaaaaaaaaaaaaaaagaagaattttcttttgataggaataacaactggaatactgttttggaactttttctaagctttatctttccaaaactgacatcaattttttaatttaaggtctcaaattataataatatatcttggctaactcataatatttattgtttctgccctcttagggggtatttgttctgctttatccttaatctttttattctaaactgcattaaatactattcatcatgttataaactgcctgaagttttcataggatattttttgctttttccatcaatttgggctatgctttttatcttgaagggggattaaaaaatgttctgtgacctcaaaagtgaccagtaataaagcacaaaataactatttaggggtgacatagtgattctcaagcctttcatcctttaataattgaaatttagctgaaagtgtagatgtcagcagagtatgtgaggaacagtagattatttctcacaatggacatgactccatttaagcttttcattcatagtttgctaatgaatatgcactaccatggccgtaagtgtcacttaaaaccatctttttttctattgtaggttgatgctcaccttaagagtgagcaaacagaagcaagcaccaggcaaaattcccaagtactgctatcagaaactggaatttatgataatgaccctgacctttgtttcaggatgcaggaagggtctgaagtttattctaatccatgcctggaagaaaacaaaccaggcattgtttatgcttccctgaaccattctgtcattggaccgaactcaagactggcaagaaatgtaaaagaagcaccaacagaatatgcatccatatgtgtgaggagttaagtctgtttctgactccaacagggaccattgaatgatcagcatgttgacatcattgtctgggctcaacaggatgtcaaataatatttctcaatttgagaatttttactttagaaatgttcatgttagtgcttgggtcttaagggtccataggataaatgattaaaatttctctcagaaacttatttgggagctttttatattatagccttgaataacaaaatctctccaaaactggttgacatcatgagtagcagaatagtagaacgtttaaacttagctacattttacccaatatacaaactcgatcttgcctttgaagctattggaaagacttgtagggaaaagaggtttgtgttacctgcatcagttcactacacactcttgaaaacaaaatgtcccaatttgactaaccaaccataaatacagtaatgattgtatatttcaagtcagtcttccaaaataagaaatttttgctgtgtcagtctaagaatggtgtttcttaaatgcaaaggagaaatcattttaggcttgatgtaagaaaatgaaaataataaatggtgcaataaaaatatagaatataccaattggatatagggtagatgttccacatacctggcaaacaaatgcttatatctactctgttagattgataagcaaatataggtattaatggagcagtcaacgtatagcacatttatgaggaaagtagagactcactgggtcacatagactaatggataggaatgtgacataatgctgctgaattaatatacttatgggcatctgaatagtttaaaagttagtcagaataggtatcactgggcaagtgaagatagcttaaactgcttcatgcttgacttgatagcaagttaaagtgcaattaatggaatggaggaaaacccagaatatttaattggtctgtaggggtcaatttgctttcattcaccacatctgcatcttgctgttcttcttactaaggaatcagggcaaatcatctgtagtgacatattttagtttgctaatcatttattttaaaatactgaggttgcagccacttaagagtatagcaaaagatggattcagatttttggactttccaaagtacttgagttaaactatttcaaaaatagcctataattttattcaacagtttgaggctattcgaattctcaggtgctgctactgaataatgtaatagtcttcatacaaagtggatagcaaaggttaaaatccatttcaacaaatatgtgagctgagctgctgcacaaaggaatgtgatgtgtgtgtgtgtgtgtgtgtgtgtgtgtgttaggtggggtgggtgacaacagaaatggtgcacgagaaactgatcaaattgacattatattttcagtttgcttatgaagctcaaaatactagagtaaatgggtcattaaagaaaataatatgtgaaattatggagtttagaatacaagtggggtatatatacaaaaagacaaaactgaggttttgtggtggagagattttcttaagtaacactggcattaagttttagctccttagatttgggggtgcaaatattcttttgagtcactgttattttgccaattacacctagaatttcaagcaaccaattcgagataggctgttttagccaggctgcatttgtggacaacttatgtaagaaagacatgttagaatagctgcttgtggtattcttaaaaatagaaacaggaaatatggggaggatacatttagctgtcctcttatcagatgaacacacgaaattgaacagttccttcatgattctctcaaacttaaaagcaaaatatttctgtcttatttaaaatatccttagtatgtcttatagtaaagataatgctgataatgatttcatctctaagatgtattaatatatttgtactgtttgccaaaatcacaaatcatttatgtttttattccttttcaaaatggtgtcagagacatacatgcattttcccaaatgactctacttcactattatttacatggcttatttcattagtttatagagggtttgagaaaaagaatatgtagataatttaatggtttttcacaaattttaagcttgtgattgtgctcaatgagaaggtaaagttattaaaacttatttgaaatcaa

SEQ ID NO: 6 - DNA, 6173 bp, Homo sapiens
cttctgtgtgtgcacatgtgtaatacatatctgggatcaaagctatctatataaagtccttgattctgtgtgggttcaaacacatttcaaagcttcaggatcctgaaaggttttgctctacttcctgaagacctgaacaccgctcccataaagccatggcttgccttggatttcagcggcacaaggctcagctgaacctggctaccaggacctggccctgcactctcctgttttttcttctcttcatccctgtcttctgcaaaggtgagtgagacttttggagcatgaagatggaggaggtgtttctcctacctgggtttcatttgtttcagcagtcaaaggcagtgatttatagcaaagccagaagttaaaggtaaaactccaatctggcttggctggctctgtattccagggccagcagggagcagttgggcggcagcaaataaggcaaagagatagctcagaacagagcgccaggtatttagtaggggcttcatgaatgcatgtgagttggtttagtagagagacacaggcaatttcagacccttctatgagactggaagtgatttaagagggaaaggatagccatagtcctgaatacatttgagctgggtttcaggatgagctcacaagttcctttaaaaaaaattgacttaagcaaatcctgggaagagtttttttgctatacaattcaaggttttaaggtcctcggattcatatactttataaatgaattagccagcttgtttaaaatgtagggaaattgtgggaagaatgccttctttacttaattcaaggttttaaggttctcttaatcaattctactagctaattagccaattatttaaaaataaaagtttgaaattgccaaaaaaaaaagacaaggaaaaggaaagaaagaaagccaccagtctgtttggcatacaatacttaattgttgcctgacctacgtgtgggtttcagatgcagatcctcagttttcagctcttcagagactgacaccaggtttgttacacggcttaaaatgatgagtatatccattgaatctcaaccttatctctctctagaccttcttggttaagaaaccatgtagtttgtatgaagtaggtactcaaaagatatttgatgatttaatttttactggagaagaaatattcatatatgttttcttatttttacatgttttaaatatgtaaagattaaataaacactcttagaagtatttaaatttcctaaagtaaatttatctcaaccagtaacaggaccctcccaatactggaaagttgagtgtgaccgcatttagtggtgatgagtgtgagcttgcttggggagagggcaggacatttaggatttcttaagcttagagtcaatacaataaagattattgagtgctcacttgggtgggctataatcactgctcacaggagttcatgaaccacaagtaaaagagtgaggagatatgattagctcacaaataactttaatacagagcagaaagtaatgaactactgcaatggagttatcacagtgctaaggatgctcagagggcatctctgataggcagaggtgagggttagggaaggaagctgtagtctagctagctagagctgctggaatagacatgacaatggctgctgccaaactgttttctcttctgaggacagatgtcccgtgcaagtggcttggtggaagggactagtgtctctaatatagggtgatttataagcaggaaagtgtgtcctagaaattcagaccagagtgatagattggaattggatcatgggggactcattgaatgttatttattgtatttgtttttgcgatcagtgttagtaaagtgtcaaagggattgagcagatgagtgacatcatgcaacacaagttttgagtttcacttgtcagactgactggagaggggcctggttagttacaggaaggtaatttggcatgcagccactatttttgagttgatgcaagcctctctgtatggagagctggtctcctttatcctgtgggaaaagagaacaaaggagcatgggagtgttcaagggaaggagaaataaagggcagagaggcagcggtggtgtcaggggaagcccacaggagttaacagcagggttgcctcaacctagagaggaagcgacctggtgccctcggctctgtggcttccttcatctaacaacatcttccactctacaacaatgccagggaaggcggaggctggtacagtgcatcaagacacagctactcctgggtgacagaggttcagggccagctcactaagtaggcagaagtttttgacatatactttgagagataaagcaagattctgtacctcaaccttcagaatttcccctaccactcattatagttccggagctatatagctcctatcattctatcataaccttagaataccagagaacatatcatctcatctaattatctcttactatatgtgaaaaaaatgaaggacatgggggaagtgtgacttgccccaaatcacatatttcatggtagagccaggtcttctgtttgtcatatcagtgttcttcctgccacaaccatcttgaagaatctatttctcagtaagaaaatatctttatggagagtagctggaaaacagttgagagatggaggggaggctgggggtgtggagaggggaaggggtaagtgatagattcgttgaaggggggagaaaaggccgtggggatgaagctagaaggcagaagggcttgcctgggcttggccatgaaggagcatgagttcactgagttccctttggcttttccatgctagcaatgcacgtggcccagcctgctgtggtactggccagcagccgaggcatcgccagctttgtgtgtgagtatgcatctccaggcaaagccactgaggtccgggtgacagtgcttcggcaggctgacagccaggtgactgaagtctgtgcggcaacctacatgatggggaatgagttgaccttcctagatgattccatctgcacgggcacctccagtggaaatcaagtgaacctcactatccaaggactgagggccatggacacgggactctacatctgcaaggtggagctcatgtacccaccgccatactacctgggcataggcaacggaacccagatttatgtaattggtgagcaaagccatttcactgagttgacacctgttgcattgcagtcttctatgcacaaaaacagttttgttccttaatttcaggaggtttacttttaggactgtggacattctctttaagagttctgtaccacatggtagccttgcttattgtgggtggcaaccttaatagcattctgactgtaaaataaaatgatttggggaagttggggctctcgctctggagtgctaaccatcatgacgtttgatctgtacttttgatatgatatgatgctcctggggaagtagtcccaaatagccaaacctattggtgggctacccatgcaatttaggggtggacctcaaggcctggaagctctaatgtccttttttcaccaatgttggggagtagagccctagagtttaaaactgtctcagggaggctctgctttgttttctgttgcagatccagaaccgtgcccagattctgacttcctcctctggatccttgcagcagttagttcggggttgtttttttatagctttctcctcacagctgtttctttgagcaaaatggtgagtgtggtgctgatggtgcaccatgtctgatggggatacctttagtggtatcaactggccaaaagatgatgttgagtttagtgttcttgagatgagatgaggcaataaatgaagaggaaggacagtggtaaagaacgcactagaaccgtaggcattggcatttgaggtttcagaatgactaatattttagatgaatttgtttgacattgaatgttcatgtgcttctgagcagggtttcaatttgagtaaccgttgcaataacatggggcagctgttttgctctttgtcttcatgacaactgtacttaagctaacagccctgaaacatgagattaggctgggcagaatgctgctagagaggaccacttggatggtctttattctccttctccatgtccctctccatcacctggaagtcacctctgggtgccactctggtgccttccttgtcgaagctgtagctgctcacatgacacctatccctgttatccagtttgcttgactgggacgttttgccttccccttcagccaggaagtgaaagtcccagtttttatttatcacaggtgttggtattggtggtagaagaggtagaattatggaatcaggcctcctgtcaggatttctttttgacagtccctctcagacacctctgcctaaggccagctttgccattacaaactctcccttctccctctctcccttcttctcttcctcttccttcttctcgctctttctctctctctctttctccctctctgtctcttatacacatacacaaagatatactctattccaacatcctctacccaacctgacagagatgtcctttgctgtaggttcagcagtggggatgagaaatacagctctcaaacaggataactaaagcttattatcttatcaagcttgttcccttgcagacaagattgatcaattatcataggctttctgggtgttctttctgaagctttctcaaagtctctttctcctatcttccattcaaggcaaatgattgccatttaacatcaaaatcacagttatttatctaaaataaattttaatagctgaatcaagaaaatctcctgaggtttataattctgtatgctgtgaacattcatttttaaccagctagggacccaatatgtgttgagttctattatggttagaagtggcttccgtattcctcagtagtaattactgtttctttttgtgtttgacagctaaagaaaagaagccctcttacaacaggggtctatgtgaaaatgcccccaacagagccagaatgtgaaaagcaatttcagccttattttattcccatcaattgagaaaccattatgaagaagagagtccatatttcaatttccaagagctgaggcaattctaacttttttgctatccagctatttttatttgtttgtgcatttggggggaattcatctctctttaatataaagttggatgcggaacccaaattacgtgtactacaatttaaagcaaaggagtagaaagacagagctgggatgtttctgtcacatcagctccactttcagtgaaagcatcacttgggattaatatggggatgcagcattatgatgtgggtcaaggaattaagttagggaatggcacagcccaaagaaggaaaaggcagggagcgagggagaagactatattgtacacaccttatatttacgtatgagacgtttatagccgaaatgatcttttcaagttaaattttatgccttttatttcttaaacaaatgtatgattacatcaaggcttcaaaaatactcacatggctatgttttagccagtgatgctaaaggttgtattgcatatatacatatatatatatatatatatatatatatatatatatatatatatatatatatatattttaatttgatagtattgtgcatagagccacgtatgtttttgtgtatttgttaatggtttgaatataaacactatatggcagtgtctttccaccttgggtcccagggaagttttgtggaggagctcaggacactaatacaccaggtagaacacaaggtcatttgctaactagcttggaaactggatgaggtcatagcagtgcttgattgcgtggaattgtgctgagttggtgttgacatgtgctttggggcttttacaccagttcctttcaatggtttgcaaggaagccacagctggtggtatctgagttgacttgacagaacactgtcttgaagacaatggcttactccaggagacccacaggtatgaccttctaggaagctccagttcgatgggcccaattcttacaaacatgtggttaatgccatggacagaagaaggcagcaggtggcagaatggggtgcatgaaggtttctgaaaattaacactgcttgtgtttttaactcaatattttccatgaaaatgcaacaacatgtataatatttttaattaaataaaaatctgtggtggtcgtttt

SEQ ID NO: 7 - DNA, 14982 bp, Homo sapiens
aatttctcactgcccctgtgataaactgtggtcactggctgtggcagcaactattataagatgctctgaaaactcttcagacactgaggggcaccagaggagcagactacaagaatggcacacgctatggaaaactcctggacaatcagtaaagagtaccatattgatgaagaagtgggctttgctctgccaaatccacaggtaagagaaggcagtaaaatgtgggaaaatgcattcttcttctcattccttacctggccaagttaacttctactgaacaactgtggttcagtaacttctagtaaacaaacacataaagctgtgtaaaaattagagagctgtaataactgcatctcacttaatttgtcttacattttctccctagaaatggagtcatctatgcatttcttacttacctaacatggatacggagagtggtgagaaaggaaactatagaaagtgtatcagctttacataagaattatatagtaaaatacaaacaatgaggttattacagttgtattttgagaaaaggtgttttgcaaaagccagagttttaaatgagccatgagtcaaacagaaatccctttctcttagggatataacttaaattatgcaaaacatgtgtttctaatttgatggggtttatgagattgcacatcaagcaccttccatgttatattatcattgcttgttatttactgagcgtaagattcaagtgagagtctgaactaccttttttcttgtttgcaagtcttacctataaagtacaaggtatgtggaaaaaaggtttgccttaaaaactacattttctagtctgtcttctaacgaatgctatgtaaaccaatttatcatcaatattttaattatcaaatacagcatttttctaagcaatttacaaattaaccctttccattctcatagccatcccaaaagttatgtatgttatttatttattattattattattattttgagatggagtctcgctctgtcacctgggctggagtgcagtggcacgatctcagctcactgcaacctctgcctcctaggttcaagcgattctcctgcctcagcctcccaagtagctgggattataggcacctgccaccacacccagctacttttttgtatttttagtagagacggggtttcaccatgttggccaggctggtctcgaactcctgacctcaggtgatccaccgatcttggcctcccaaagtgctaggattacaggcgtgagccactgcacccggccagaaacgtatgttattatcctcatgttcctaatgagaagtataaggcatgcagaatgtaattatcaaactatgtagctagcaagtgccagaggccagtatgagcctaagcagcctgtctccagagtctatgatcttaaaaccattattccacactgcctctcttaagaagggataataagacattgcttattttctttctttcaatcttcagtttaacaaggtacatgggattccaggagaagatttctatgaacatgttataataattctgtagacgagtgtatttttgtttgtagctcaaacagttacagtccacatactagagagcacctttaaacacagcaaatgtttagtcagagatttcaacctaactgtgcttagaaatgaaatcctgtaaacaatttggtgatactggcaaatttaaagcatctacctccttccaatctaattttcctcttcagattgttaattaaagaaaatgaaaagtatactttaattttattgccaaaagcactagtttgctttattcatgcaaaacaataatactcaaacttgctatttgcccgcagatctacaaaaatgctgggactggatgatttcaaggatgtacttatcaatggtacaataaaaccatctttttcagaaactactaaactttgtatcatgggttttgtttctcagatattcgattctccttaaaaatgcaacaactgtgataattatgaatacctgtagaacagattccaaggagtaaagcaaaaccccaaaagaaaacaaacgaaactcttccttagctacttaaaaaaaagattctcggctggggacgggtggctcacgcctgtaatcccagcactttgggagacggaggcgggtggatcatgaggtcaggagttcgagaccagcctggccaatgtggtgaaaccccgtctctactaaaaaaatacaaaaattcgcagggcatagtggcatacacctgtaatcctcgctactcaggaggctgaggcaggagaatcgcttgaacctgggagtcggaggttgcagtgagctgagatcacgccaccgcactccagcctgggtgacagagcgagactccatctcaggaaataataataataatagtaattctgacaaggtgcagtggcttacacctgtaatcccagcactttgggaggctaaggtgggtggatcacttgaggtcaggagtttgagaccagcctggccaacatggtgaaacccctgactctactaaaaatgcaaaaaaaaattacccagcatgttggtgtgcccgtagtcccagctacttgagaggctaagacaggagaattgtttgaacctgggaggcggaggttacagtgaactgagattgcgccactgcactccagcctgggtgacagagtgaggccctgtctgaaaacaataacaataataacaattctgctagctgagatgctgcagaagctagattcactgtcccggaaacatgaaaaaaaattattggttacttttatttcttcactgaagatctttcctagaaattatgaaccaaaaaatgtctgttttatctctcataatctatctgcttcttagtccaaaggaaaataatatgttttctgattccatatagatagatacaaggcacaatctctaatctagcagaatttgaatgatcctcagtatgattcatttttaatttatattataccatttagggatcctctgaaccagagcatattactgattaaattttatacttgttgaaagtgctgtcaaataaaatgatcatcattgtgcagaacaaaaaagtattctgttatttggagaaaatcacaacaaccaaaaaaataagatgtactagatggtgaaacatagaataaaaacaacaaaaatacatttattacatttcttttgaaagttggaaacttcacaataaactcgatatacaaaaatcgttatgtaaactgtataagcctgggtttccttatttatgatacagagataacttcttgggccattacaataattaaatatgtatcttttatatatatgaaattatcgagcagagtgcctagtccactattgacatttaaaacatctcattttccttccattcaaagaacttaaaatctagccaagataaaccaaagtaggccaggcgcagtggctcatgcctgtaatcccagcactttgggaggccgaggcaggcagatcacctgaggttaggaggtcgagaccaacttggccaacatggcaaaaccccatctctactaaaaatacaaaaattagccaggcatggtggctcatgcctgtaatcccagctacttgggaggctgaggcaggagaattgcttgaacccaggagacagaagttgtagtgagccaagattgcgccactgcactccagcctgggcaacagagtgagactccaattcaaaaaagaaaagaaaagaaaaaccaaagcagcagataataattgtttaacaatttgaaaaggcataatccatagaatttatagtggaggagattggtttcaaatagagtagtcaggaggattttagtgaaacctttgaggtgaactttgaaaagctgcaaatggcagtgtttgaagagagaggaagaggtggaacacagagagggtcttcagccctgcgtgtgcagatgacaagacagaggctggtgtttccagacaggtaagccatatgccagggcaacattgcacagaatggatgtgaaggcaaggcatactatcagtgggaagccaaatctacaataactgctactactaaataaagatcttttttttttttcaaggaaaatctacctgatttttataatgactggatgttcattgctaaacatctgcctgatctcatagagtctggccagcttcgagaaagagttgagaaggtttgacatatgtattacatttgtcttcttgtatagcttcttaacattgttaacttggttttgaagcataaaacattactgagattgatttgagtcaattgctccatttgttttcagttaaacatgctcagcattgatcatctcacagaccacaagtcacagcgccttgcacgtctagttctgggatgcatcaccatggcatatgtgtggggcaaaggtcatggagatgtccgtaaggtttggagattttctcagatttcttatgctatgtgacagattttcatctaatttacatttaactttccaaaaattttctaaaagcattataactgcatcatgcaaagtttagataacacgacaaaatgataaagaaaatatgccctggcttgacatgtccactgttatcattattatatttttagtcttttacttcatttttcatcctgtattttatctggcaaccctaattacataaaactaatacagactgcaatatctaacctttaaaacacacatgggcctcccagcactttgagaggccaaggccggaggatcacctgaggtcaggagttcaagaccaacttggctaacatagtgaaaccccatctctactaaaaatacaaaaaatagccaggcatggtggcaggtgcctataatcccagctactcgggaggctgaggtgggagaatcacttgaacctgggaggcagaggttgcagtgagccgagatcctgccactgcgctccagcctgggggacaggagcaagactccatctcaaaaaaaaaaaaaaaaaaaaaaacaacaacaacaacaacaaaaaacctaactactgtattttaatcaggtcttgccaagaaatattgctgttccttactgccaactctccaagaaactggaactgcctcctattttggtttatgcagactgtgtcttggcaaactggaagaaaaaggatcctaataagtatgtaaacagtgataacaacaggaatttttggagtgtgtgccgattaaataaaacaggggttgttcattggcttaattttgggcagcgcagctttcctctcagctgggtatggttcctctcagttcctcggctgggtacggtttcttggactgctgtgtctaccactacaaatgtacacatatgtgacaggtgtatagttaacacagtaaaatgcacaaatcttaagtgttcagcttgaatttaactattatatacatacatacacccaccattctcagtaagatacagaattttttatcacctcagaaaatttctttgtgcctctttcaattccctttcctgccacagacaaatatatttttatttgccttatcaaaaattagatgatttttgttattgggtttcatatcaatgaaaccacagagtatagactcttgtgtctggcttcttttgatgagcatgtctttgagattctattaatttaattttttagcagccaattgtggttaagagtcaacacatctttaattacaggcagcaatgactggtttctcagagcagtctgctcaggatataggtgatttttacccatttaggcataagatctgctacaataaaggaaagggagaaccaaagcccacgtctctgggtgtgtgcctgtagaaaaatattctgcaaatgggaatatcataaaatgaaaggattcaatctagaaagtttcttcttattaaaaattagtttttttaaaaaaaaattcaccgggaatggtggcgtatgtctgtggtcccagctacacagggagttaaggcaggaggatcacttcagcccaagaagttgaggctgcagtgagccatgttcgtgccactgcacaccagcctgggtgacagaatgagaccctgtctcaaaaaaataaaaataaaacaactagttttgactgtccatgtgtgttccttgcatatttaattatttcattcatttgtaagttattaagttaaatgtaatgcctactgaagaaacattttaataagctttttctttttacctatgtcttacctctgatagtagcattcaatcaaatagcaacaactcatcattatttgatgttaaattggttttctttctctcttccaattggtccattgcttcatggctgctttcataaggcccctgacttatgagtaagtatctgattcttgtttgattctaagaattatttgttacttatagttgaatgtaggtttatcaatagactccaaatgcatttttaaatgattaattgaattcagccaaaaaataatttaagtgactatttagagaacaaataatctcagtctttaattgtatctatgattgtgttacaactatgtctatctgatattatagctatagatatatacaagaatactactcaaatacatctgtaggaaattaatatgcaaacatacaaaatgcacatacatctgtgtatctatgatttaataactcccatgtccataactagttaccggtgtcaataagtaaccatataccaacttgttctttttgacccaatccttactacttttgacctataatatatactaaacataggctaagagatggaaaacctgggctgggtgcatggctcacgcctgtaatccctgcactttgggatgccgaggcaggtggatcacctgaggtcaggagttcaagaccagcctgggcaacatggtgaaacctcgtctctactaaaaatacaaaaaattagccgggcctggtggcgggcgcctgtaatctcagctactcaggaggctgaggcaggagaatcaattgaacccaggaggtggaggttgcagtgagcggaaatcacgccactgcattccagcctgggtgacagaacaagactccatctcaaaaaaaaaaaaaagatggaaaaactaaggtaaatatcatcagtataaacccaccttggtgaagctagactaatgaagaggaaaggcagtatatgaaaattatgtaaattgcgatatgataaagataaggcataagaagttaaagtattgggatccctaaccaaataaaaggagtgatgggggaacccttgaagcaagttatttgaggaattagctagaggaaaaaggtaagagtattcatagcggaagaaacagcaaaagtgagaccttgaagtgacaaacatcttggtgcgttatcaaagctgaaggatggctaatgtcactgataataagtgataaaaataacagtgtgagaaaaagattaatttttttttttaaagatcgctgggaaaagtgggtgaatcacctgaggtcaggcattcgagaccagcctggccaacatagtgaaaaccctcctcttctgaaaatgcaaaaattagcggggcatggtggcacatgcctgtaatctcagctactcgggagactgaagcaggagaatagcttgaacccaggaggcagatgtggcagtgagacgagattgtgccattgcactccagcctgggcgacagagtaagaccccatctcaaaaaattaaaataaaaataaataaagattatgtaggattttattagctatgataaggagttaaaacagtatcttaagggagaaactggaaggtttttaaaaacgaggatgacatcagcagtcagtctcactttacagatgagaacaccaaggcagacggtgtcatatcttgctcaaggtcacacagcaagtaagttgcagagatggtctggcttcagataccatgaatttaaccaccacaaaactcatagatatacagatagtaagactatgtttgcaccaacgcccaaacttcaattaaaaagaaaaacagggtctaatcagttatttgaatttcgcagtcaattcctttgtaaagcatataaaccactgagaaattgaattaggctcacaaattaaaatgtgaatatgaatataattatttaaacaaaagactacctcttaaaactctacctcgcagatatcctgtgagaagttgacgggataatagaaacagaactagtttgggaatttctaattctgagtgttttttgttgttgttgttttgttttgtttatttgttttctgagacgagtctcgctcttgtcgcccaggctggagtgcaatggagtgatcttggctcactgcaacctccgcctcctgtgttcaagtgattctcctgcctcagcctcccgagtagctgggattacaggcgcccatcaccatgcccacctaatttttgtattcttagtagagacggggtttcaccacattggccaggctggtctcaaactcctgacctcaggtgatccacccgccttggcctcctaaagtgccggaattacagatacagatgtgaactaccatgcccggccctagttctgagttctaatatgaaactttaggtctcagtttaacctacttactattaattatatgatcttggacaatgggcctaaaaaaggagtcttaatattcccaactacataatggagatagtaaggcctgccacacctctctcataaaattatgttgaaactaaaatagcataaataaaaatgtcaaaaaatatcccataatttttgctaaacttcttgccttccttatccaatttcctcaggaacatggacgttttgttctcatttcgtgatggagactgcagtaaaggattcttcctggtctctctattggtggaaatagcagctgcttctgcaatcaaagtacgtctatcctcacttcaaaatttatatgtcaatttacgtaagcagagcaatcacttcggagcctaaactatactaagcatgagttaactttatccttaacaagtacaacatgggatcatttaattgggggtaaaggatcaattatttatttttgtgtattacctaaaatataaaatctcagagccatatacttaaaatccaacttgaaacctctgtaggagataaaaattttcaataaaatctggctttggaactatgatacagtgtcataaattcaatagttttgattatcaaaaatagaaatgaaacatatacaactatataaatatctttaaattaaatgctatgtgaataaaaacaaatccaagcttctataaatgtaaggaaattagtcaaatagagtgtccagcccaggaaagaaatgtaaaaatcccaaatttaatttatggattaagacgggggaatttggcagggcacagtggctcacacctgtaatcccagcactttgggaggctgaagtgggcggatcacttgaagtcaggagttcgagaccagcctggccaacatggcgaaaccccgtctctactaaaaatataaaaattagccgggcatggtggtgggcacctgtagtcccagctactcaggaggctgaggcaggagaatggcgtgaacccgggaggcagagcttgcagtgagctgagatcgcgccactgcaccccagcctggacaactgagcgagactccgtctcaaaaaaaaaaaaaaaaaagaaagaaagaaaaccttaaatgtttgtgttttgtttgtttgttttaggtaattcctactgtattcaaggcaatgcaaatgcaagaacgggacactttgctaaaggcgctgttggaaatagcttcttgcttggagaaagcccttcaagtgtttcaccaaatccacggcaagtgttgtgtgcagtgcaatagtctaggctgacaagtcaaatgttccaggtgtagaatagttgaaaaaagggaagcaaaaagcaactatcacttagtatgttttcactttaggtattttatcttactaaaccattccactttctatgtggtaggtttcattatctccattttataagtaaagtcatctaaattcagaaagacagggtaaatgacttcagattccacaggcggtgaagccagagttccaagctgggtctatttaacactaaggaacttccttgcctcccgctaaaaaccttagagaaactttccacatgggagggtggttttaagtcccgaaaaaaaaaaaatagcttctgcttgataagaactccttcctaattctgtttttttacaaattaagaaacaatacagaaaagtcattgaggtcaaaagttgttgcaaaattaacagctaaaaaactacccacaaaaaaacacacaaaaaagtgcataagcagtaatttgcaataggaaatctgccctactgaacagactcaacaaatacttgattgtttctctctgggttttgagttattgctgtttagtccttggcaagaagctagattttcaaatcaagtagggtaggagactgagtgcggtggctcatatgtgtagtttccagctacttgggaggctgaggtgggaagattgcttgagcccaggagttggggctgcagtgagctatgatcaatacattccagcctgagtgatgaagtgagaccctgtctccaaacaatttttaaaaattttaaaaatagagagggaaatctagtttctagggttttgttttggtttgttttgatttgtttttttttgtctttggtttgtttctttatgtaaacagtttacttgttacgtcagtaagcacgtaaagtaaagtagtgctaaataaatagatacagtttaatgggcttcctggaagagggtaggaaagtgaatgcttatctgcaggggctttgtttagcatagactgacctaatgccttttcctgcagcctgtgccaaaatccattatcagttgtacacaacaccttgatttccctgtatacctctgatgctgcttaattaaacatattccatctttttacagatcatgtgaacccaaaagcatttttcagtgttcttcgcatatatttgtctgggtatgtagtcttatgtttgaatttgtttgctctcacttaacaaagaacaccaccaaattctcttggttggtccctaatatccattgggtttggctaacaatttacatccaaaaattcacatggtagaaaaatactagactgttctgttatcacttggccaggaatgtactggagtgggggacaggaaagctagttattttaaaaagagtggtctgtgctagtacaaaggtaagattccattcctagaatagttatgccaaatctgctcaggattatattatttactattctcatgcttgaaaatgagcaggggcaagggggtatgaaaaaaggatcatgaaatccatctcttgtcaccttctgttcagcactagtgcaagatttggtacctgaaaattagcaattaacctaaagaatgatttttctttttttctttctttcctctgatagctggaaaggcaacccccagctatcagacggtctggtgtatgaagggttctgggaagacccaaaggagtttgcagggggcagtgcaggccaaagcagcgtctttcagtgctttgacgtcctgctgggcatccagcagactgctggtggaggtgagtggaaaataacaagaaataattatctcttatgtgaatacaatagtatttggatatctacaaagcaccttcccatcagcatcttatctgagcttatctgatagttttagcagaatcaggcaagtagggatttggttgccatgatcccattttaaaaatgaagatgcagaaacttaatgagagtcagtgacaggttccttgtgaaccagctagaaagtggcagagctggccaggtgcggtgactcaagcctgtaatcctagcacttcgggagacctaggcaggtggatcacctgaggtcaggagtttgagaccagcctgaccaacatggtgaaacccggtctctactaaaaatacaaaaactagctgagtgtggtggtgggtgcctctaatcccagctactcgggagactgaggcaggagaatcgcctgaaccccacaggcagaggttgcagtgagccaagatcgtgctactgtactccagcctgggcaaaagagcaaaactccatctcaaaataaaaataaaaaataaaaagccaggtgcagtcgctcacgcctgtaatcctagcactttgggaggccgaggcgggcggatcacaagatcaggagatcgagaccatcctggctaacacggtgaaaccctgtctctactaaaaatacaaaaaagtagctgggcatggtggcgggtgcctgtagtcccagctactcgggagactgaggcaggagaatggcgtgaacccaggaggcggagcttgcagtgaaccgatatggcgccactgcactccagcctaggcaagagtgcgagactccatctcaaaaaaaattaataaataaaaacaaaaagaaaaataaaataaaataaattggcagagctttcctcacacccaagttccatcttgaaatctgaacatgtctataaagactggttgactccggtgaagccaatatcacatgctctgaaaatgtatgatcagactcagaaagagacactcacctgcaaatgagacagggctgttagtggggagataaagacctcagtgacaagcagagtctgggccctgctcttgttcagctgtcccgtggccccagccacccagagcaatgcctgcaccaaagtttaaaggtgagccacattcattgtatgccttctaggggcttagctggaggggaggaataagctccaagaagaacttctttttaattttctctgttttgttaaacttctgtttaacagtcaaaggggaaagcatcgggctgggtaaaaacatgagtttttcttaatttgagcactcatttttaaaatttttttatcatatttaacttttttattttagattcaggggatacatgtgcaggcttattacacaggtataatgggtgatgctgatgtttgggcttctaatgatcccctcacccaagtatagaacatagtgcccaataggtagtttttcaacctttgctttccttcctccctccctcccctatttgaaatcctcactgtctattgttcctatctttgtgtccatgtgtactcaatatttaactcccacttatcggtgagaacatgtggtatttggttttctgtttctgcattatttcacttaggctaacttaagctaatggcctccagctgcatccatgttgctgtgaagcgcttgatttcattctttttcatggctgtgtagtattccatggtgtacatgtaccacattttctttgtcccatctaccattgatgggcacctgggttcattccatgtctttgctgttgttgaacactcatttaaacacaatctcttaaactctcttaagaatcagtcataatctgtcaaatgcagattatatatgccccttgtctataccatcagcttcttacagtagaaaagagagaaagaaagtgcaaacaaaggccaggcgcggtggctcatgcctgtaatcccagcactttgggaggctgaggcaggtggatcatctgaggtcaggagttcgagaccagcctgaccaacatggagaaaccctgtctctactaaaaatacaaaattagccgggcatggtggcgcatgcctgaaatcccagctactccggaggctgaggcaggagaattgcttgagcccgggaggcacaggttgcggcgagccgagatcgtgccactgcactccagcctggccgacagagcgagactctgtctcaaaaaaaaaaaaaaaaagcgcaaacaaaaatacttattgtgagaaaatgagtttagctcattcagttttcaaaattaataatattttacaataattacgattgctagtagcaagactaatagccaaacattagccttcaaatagaatgaccttgacctcagtgaatgctatattggtgatctcctgcccactctgacctcactctgcctttctctcctggattggggaatgctgtgacctccgtatttcctctttctctttttcctataggacatgctgctcagttcctccaggacatgagaagatatatgccaccagctcacaggaacttcctgtgctcattagagtcaaatccctcagtccgtgagtttgtcctttcaaaaggtgatgctggcctgcgggaagcttatgacgcctgtgtgaaagctctggtctccctgaggagctaccatctgcaaatcgtgactaagtacatcctgattcctgcaagccagcagccaaaggagaataagacctctgaagacccttcaaaactggaagccaaaggaactggaggcactgatttaatgaatttcctgaagactgtaagaagtacaactgagaaatcccttttgaaggaaggttaatgtaacccaacaagagcacattttatcatagcagagacatctgtatgcattcctgtcattacccattgtaacagagccacaaactaatactatgcaatgttttaccaataatgcaatacaaaagacctcaaaatacctgtgcatttcttgtaggaaaacaacaaaaggtaattatgtgtaattatactagaagttttgtaatctgtatcttatcattggaataaaatgacattcaataaataaaaatgcataagatatattctgtcggctgggcgcggtggctcacgcctgtaatcccagcactttgggaggccgaggcgggcggatcacaaggtcaggagatcgagaccatcttggctaacacggtgaaaccccgtctctactaaaaatacaaaaaattagccgggcgcggtggcgggcacctgtagtcccagctactcgggaggctgaggcaggagaatggcgtgaacctgggaggcggagcttgcagtgagccaagattgtgccactgcaatccggcctgggctaaagagcgggactccgtctcaaaaaaaaaaaaaaaaagatatattctgtcataataaataaaaatgcataagatataa

SEQ ID NO: 8 - DNA, 14341 bp, Homo sapiens
ataacatcctgtgcgctgctgagctgagctggggcgcagccgcctgtctgcaccggcagcaccatgtcgctcatggtcgtcagcatggcgtgtgttggtgagtcctggaagggaatcgagggagggagtgcggggatggagatctggacctggaggtaaagatatgggcctagaggtggagttatgggcctagaggtggagttatgggcctgaagtggagatctgggcctggagtggagatctgggcctggagtggagataggggcctggggtggagatatgtgcctggagtggagatctgggcctggagtggagatatgggcctggggtggagatatgtgcctggggtggagagatgggcctggaggggagatatgggcctggaggggagatgtgggcctagaggtggagtgatgggcctagaagtggagcgatgggcctggagtggagatatgggcctggaggtggagttatgggcctgcagtagagatatgggcctgaagtggagatatgggcctggagtggagatatgggcctagaggtggagttatgggcccggaggtggagttaagggcatgaagtggagatctgggcctggagtggagatatgatcctggagtggagatatgggcctggggtggagatacgggcctggagcagacatacaagcctggaaaggagatatgggcctggagaggagatagaagcctggagtggaaatatgggcctggagtggagatatgagcctggagtggatatatgagcctggagttgagataggagcctggagtggagatatgggcctggagtggacttaccagcctggagaggagatatgggcctggagtggagatacggacctggagtggagatctgggcctgttgtgtagatctaggcctggaggtagagatctgggcctggaggctcagtctctgcacagccgagatccttgttcctgggggcaggtaggcagcgagggtgagtttaccttcagcccagcaagggcctggctgccaagacgcacagcccagtgggggcagcagggtgccctggtttgcctgcagagggatggtccatcatgatctttctttctagggttgttcttggtccagagggccggtccacacatgggtgagtccttccccaaaccttagggtgtcatctccccacataagaggattttcctgaaatgggagggaagtcctgtcggggagtctctcatacactaggaagaggggaccctcggatgctcggcccacatttctgaccttgccttccccggcctttcattccctttcctgagtcaagctctgtgaagactggggtgagactagggtgctccaagatgggtgtgcagggaggaagtggtgtcagcagcagagaaagagagggaagcagtgctaggaacagcaggtcctctgaggacaaaggtgtaactcacaccctccagcgtttccgtgatggtaggggctgcagtgtggctgcggtctttctaccagaaaaggtgaggaaaccacagccatggccctgacattccaaatcctctgatgggggctcagttcatcaattggctgatattccattcacataggacttgccctccatgccgtgtctactttgtgttgttttatatgagtaattttgcagtattaaaatctagtaagagttgcttctccagcaacttgctcaaagttctcagctgacacttgttgtagggagacgccaagtctatgcaggatgggtccttcctgtagccctgggcacccaggtgtggtaggagccttagaaagtggaaatggggagaatcttctgggcactgggagtgaggggcggctccacatcctcctctctaaggcagtgcctccttctcccccaggtggtcaggacaaacccttcctgtctgcctggcccagcgctgtggtgcctcgaggaggacacgtgactcttcggtgtcactatcgtcataggtttaacaatttcatgctatacaaagaagacagaatccacattcccatcttccatggcagaatattccaggagagcttcaacatgagccctgtgaccacagcacatgcagggaactacacatgtcggggttcacacccacactcccccactgggtggtcggcacccagcaaccccgtggtgatcatggtcacaggtcagaggctttccgtctgggcttctcactgtcccacctcctgaatcccagagcttctggtgggggtgtccgtcagggtcccatcacccaggccctgactgtatttggggtcaagggagattgaatacaggggaaatgggtgctgtggtgggaagaatcactgtccccaatgatggctacattgtaatccctggagcctgtgactatttatgttacagggcaggggactgaaggggaaggtggagctcaggttgttgatgagttgaccttgagatggggagacagcctggactgtcccactgggctcagtgtaatcacaagggtccacatgagaggtggaggaagaggggagtggggattagagcagtgtagtgggagggagacgctatcagccactgcgggctttgaaggtggaggaagaccactagtcacagaatgcaggtggcctctaagggctggagaagtcaagagaactgattcgctgattctccagagggaacgcagccctgtagacaccttgatttcagcacagggagaactggatccaatttctgtctccagaagtggaaggggtcagtgtgttctctcccgctgccatgtttgtggtaattttctgcagcagcaacaggaaaccaacacaggaacccaggtcaaggacaagttaggaaaccaaacaaggatagccagatgtggtggtgggcacgagtaatccaacgactggggaggctgaggcaagagaatcacttgaactggggatttgttcaaaagagattgattcaggctgctaagagcctggacatgcagcctgtcctcttccacccccacatagacagcaggaaagagattagtgggaaacagatacaacagcccaagagatgaggctgtcttcacagtggcaagggagtcaggggctactggagacagagggacagagaagagggaggaagacagatggaggcacctgcaccaggggatatgggcacagaaaagacacggagatgcagagagggaggagagagacagacacggggaggggaaccctcactcattccaggtgccatggatgggatgataaagagagatgccttctaaactcacaacttctctttctaggaaaccacagaaaaccttccctcctggcccacccaggtcccctggtgaaatcaggagagagagtcatcctgcaatgttggtcagatatcatgtttgagcacttctttctgcacaaagaggggatctctaaggacccctcacgcctcgttggacagatccatgatggggtctccaaggccaatttctccatcggtcccatgatgcttgcccttgcagggacctacagatgctacggttctgttactcacaccccctatcagttgtcagctcccagtgatcccctggacatcgtggtcacaggtgagagtgtctagacattgttctcattgtcactgggacacagagtgaatgatccaggacttggaacccccaggtggtcatgaggaagataagtgtgggattcttatggaaagagagtgacttggtgaggtctgtaccaacagagacagagaaacaggagacataagtacagaacaggtgtcataacagaggacagacacaggggccatacagggaggtagaaaagagagaaagaggtaaaggagacactcagacagacagacatgtcccagagagaggtgtccttccatgctgactttgctcagagacctggcacaggttagaagtttcatttctgttttacctccacaaagtgttcctaccagaagaacccaaggacacccatatttctgacctgagttgggccctgtggcctcaggccttgtgccacctacagatgccgtgtttattctgacacctctgccttccatgcaatggagagtaatcatcccaggatatcatggcccctgaacaccaacccctgtatgctgtgtgaacttggggtccccagactggattctgaggctcatattccaaataatcccacatatgataggatcgctgagagacacagagaaaaatcagggacaccaaaaagcaaagacataaacacacacaaaatgagccagaagaaggagattaagagattcacagacacataaaaagaaagaaaagagggcagaatggagagaatgatggaaaggaggagagaaaagccccaaaatcagaaccctgagggagggacacaaagacagagaaagataaatatgtggggatggattgcagagattccaaatagaactagagagactgagaggcagagaaagacaaggagacggagagagagagatgatagatggatagatagacgtagatagatgataaataggtagatgatagataatggattggttatagatacatagatgatgactgatagatgatacatagagatgacgatgatgatgatagacacatagatatatacatagatgatacataaatagagacagagaggcagacagagaggtaatagagagagagatagatgatacatatatagataatagatgattgatggatagatagacagacagacaattgatagagagatagataagtgatacataaatatagatgatagataatttgtagatagacacaaaatagataaatagatagaaatgtgcagaaagttatgaacaagacagaaagtgagagactcaaaattaaagaaaaaggaagatcaagtcaaccaatccaaggagggtcagagagaataaaacaatccaaaaagggaaaacatacctcagggtggggaagtgaggtcatagacctagagagacagaaaaggtagaaggaggaaacagatatgaagagagatggggtggagggtgagagagagagagagagcattaggtcatagagcaggggagtgagttctcagctcaggtatgaggggagctatgacaaggaagaacctccctgaggaaactgcctcttctccttccaggtccatatgagaaaccttctctctcagcccagccgggccccaaggttcaggcaggagagagcgtgaccttgtcctgtagctcccggagctcctatgacatgtaccatctatccagggaggggggagcccatgaacgtaggctccctgcagtgcgcaaggtcaacagaacattccaggcagatttccctctgggccctgccacccacggagggacctacagatgcttcggctctttccgtcactctccctacgagtggtcagacccgagtgacccactgcttgtttctgtcacaggtgagaaaagcccatatctctctcatgtcctatgatcctaaatccttagctaaggagcttcctgctgatgatggagaaaagcatggacagatgcagagagaagacacagcaggtgtgagggcggagtcagggcgcaggatggcagacagggcacctccaaaccctccttcatggcctgcatggaggcctccgatcagggctccaggcacccaggcagatggagaaagcggtcaggacagacccagagaaggggagactgggcttagtttggggagatcagaggttccctcagcccctcaatcttatccatttcccagaagcccatcatggcctctcacccacacagagagatatcatcaccagcaacccctacacccttttcttttcattttcaaaaatatttattgaggttaaatgtaactatataatttaccacctttaccatttttaaaagtaaaatctagtggtcataaatacctttatatgctgggtgtggtggttcacggttgtaatctcggcgctttgagaggccaaggaaggtggatcatttaagatcaggaactcgagatcaccctggccaacatgtgggaaattcatctttactaaacagacaagaaaaattagccgagcatgctggcatgcacctgtagtcctagctacttgggaggctgaggcaggagaagcacttaaacccaggaggcagaggttgcactgagccgagatcatgccactgcactgcagcctgggagacagagagagactctgtttctaaataaataaatacatctatattcttttttttgttaccctccacccttcccttcctggcctctggtgtccaccattgtattctccaccttcatgagatccaccttttatctcctgcatgtgggtgagaaatgggaatctttgtaatgacctccagttccatccatgtggctgcaaatgacaggatgttattgtttctatggatgagtagtctccactgtgtgtgtgtaccacagttctctatccattcacccactgatgggcaggtaggttgactccacatcttggctactgtgaacagtgctggaacagtcatatgagtgcagatatcacttcgatacactgatgtcctttcctttggatataaacccagtagtgaaattgctggacactatgaaagttctctttttttttttttcttttttgagaaagagtttccctccttagtccaagctggagtctaagtggtgagatcttggctcattgcaacctgtgcctcctaggttcaaatgattgtcctgactcagcctccctagtagctgtgattacaggtgcacgccaccatgcctggctaatttttgtatttttttagcacagacgggatatcccaattttgggcaggctgctctcaaactcctgacctcaagtgaggtgcctgcctcggtttcccaaagtgctgaagttacaggcataagccactatgcccagcctccttttagttttttaaagaatttccatacttttctccataatagttgtactaatttacattcctaccaacagggtaccagggttctcctttctctaccatcttgccagcatttgttttgcctgtcttgcagtaaaagccattttactttactttattttatttatttatttatgttgagatggagtttcactcatagtctcccaggctggagtgcaagggtgtgatctcagctcactgcaacctccgcctcccgcgttcaactgattctcctgcctcagcctccaaagtagctgggattacaggcatgtgccaccacgcctagctaatttttgtatgtttagtagagagggagtttctccatgatggtcaggctggtctcccgacctcaggtgatccgcccacctccgcctcctgaagtgccggaattacaggcgtgagccaccggcctaaaaggcattttaatgggatgagatgaaaactcatcgcgattgtaatttacatttctctgatgatgagtgatgccgagtactttttcatatacgtgatcgccatttctatgttttgtttgtggagaaatgtctcctcatgtcttttgctcgttttttaattaaattgttttattgagttgtttgagcttcttatatttccagttattaatcccgtctcagatgaatagtttgcaaatatttgctcctattttgtcggttgtctcttcactttcttggtttatcttttgtggtgcagaagttgcttggtttgatgtaatcctaatggtctattttttgctttgattacttgtgttttgaaggttttaaacaaaatgtctttcgtcagacaaatgtcttccccattattttcttctacatgtttcataggttcaggccttagactcatgtttttaatccattttcatttgatttttgtgtatggtgacaggtatagatgcagttttattcctctgcatgtagatatccagttttccccacaccatttattgaaaagactgtcctttcctgattgtaagttctcggcacctttgtcaaagtccattaaatgggctgggtatggtggctcacacctgcaattccagcactttgggaggccgaggcgggtggatcacctgaagccaggagttcaagaccaggctggccaacagagtgaaacctcgtctctactaaaaatacaaaaattagctgagcatggtgaccagtgcctgtaataccactactcgggtgtttgaggcaagagaattgcttgaatccaggaagtggaggttgcattgagctgagattgcacctctgcactccagcctgcatgacagagcaagattctatcacacacacacacaaaaaaagccattggatgtaaatgcatggattatatctgtgttctccattctgtttcattttttatgtgcctttctttatgccaatgtcatgctgttttgcttactacagctctgtaacatatttctaagtcaggtagtgtgatgctcctgttttctctttataccttcaagtctcaagacagtgggcatcgcacacaaaaattatggagaagaggatcccaagactcccagggtccaacattagataacagagtgttggccatgaaccaacctcaaagatttccattgagtagaggacaagcaccctcatttcctcacatctctcctgtcccatgttctaggaaacccttcaagtagttggccttcacccacagaaccaagctccaaatctggtgagtaaaggacccctcttatctctgcttttggaaacctggggaggtggaagccttggatgcaagtgttggctcaaacctcccagctctgtgaatgagggcctgtcttccaccatctctgaactccagacactccaacagtgaaagggatctagggccaccaaagggctcagcgaagtctcttaacctttaatgtcctgcaggtgagacctcctacaagctagaagaatgattgccaatctgacatccttctcaggaaacatgcagtgttttttcttcctgcattcctaactggaggataaattcctggggacttgagagagggaagggaagggaacatctgatgagggcgaggtgttttagagaagttccacttgccaaggaatgaattactgttggtcatgaagcaaccctggctgactcagcagagcaagagccttgccgtaacagagaacagagctcatgcacgcacacttcgactcactgactcattcagccacggccccatgctcaggctgtgcagttggaatcctttcctattgttgccataacaaatttccacaagattcgtgggtgaaaacaaaacggttttttaattatcttacagtgctgtagctcaaagtaggaagtgcatcttactgggctaaaatcaaggtgacagcaaggctgccttccctctgaggattccaggcaagaatctgcttctcacttgtcccagcttctaaaggctcccagttccttggctcctggtccccttcctccttcctcaaagcccacaaagactggtcacatctcacatggcatcactcagacccttcttccttaccacacctctttctctgaatgctgctctcccttcttccttatcttttgaaaacttggggattctattgggttcaccaagatgaaaatccatcataatctcccggaaatcattcaggatacccttgttttaagttcagctgactagcaaccgtaattccatctgcaatcttcattccttctttccatgtaaaataagatattcacaagctatggaggccaggacagggacattttggggtgggacagcattctcctgccttccacgaacggtgaacaagatgcatttggcctctgctcttgggacactgatattgcagatggttaaatgggaggacagaaaatgaatgcacaagtggaccaataaatgaatgatccattgggaagcatctgtgcatgaaatctatttgtttgttcgttcatttatttattgagacagagtctccctctgtcttccaggctacagtgcagtgtcacgatcttggctcactgcaacctgcgtctcctggatccaagtgattctcctgcctcaccctctcgagtagctgggattacaggcaactgccaccatgcccggctaattctttttgtatattttttgtagagaggatgtttcaccatgttggccaagcttgtctgaaactcccaacctcaagtgatccgaccatctcagcaacccaaagtactgggattacaggcgtgagccactttgcccagccagaattcaaaataaataatagataatgctgagtgtataattttgggtgacagagaaggtctcactaatcagatatttgtgacattaatgaaaaacacggattgaacccctgaaagattggcggaaggattttccacacacagctgtcagccgtgaaggcagaaagctgaaaacaatctgatgtggaaggaagaggctctgcctgaaatgctgggaatgaggtggggagaatgacaagacgactgtggagagacggagagcacactgggtacacaggaaactaaggagcaacaaggagtgtgtgtttgacactcacagccattggattcacctcggggtagccaggaatccctacatgattaatagtgactgacatgaaaataagggaggcccaggtgcgtaactggaatctaggagacagtggaaaaggcaattgccgccccactggtgaaatgtggtgctgatttagaccctaagtggatgaagcagatggatataagctatgtttgggaggtagaatcatttgcagggagggcttgctgggtttgagtttcctagttgtttaatccttgctaaattaatttctttctgagatttattcctcctacacataaatcaatacctggcaaaggagtgacagatatatgaggggtggtggaaatgaagggacctattatagcatagtatacaagtctgtgaacggtggctcactcctgtaacccagcactgcaggaggctaaggccagtggattccaagaagtcaggagttcgagaccagcctggccaacatggagaaaccctatctctacatggtgaaaccctatctctcctaaaaatacaaaaattagccgagcatggtggtgcatccctgtaatcccagctcctgctctggaggatgaagcaggagaatgacttcaacccaggaggtggaggttgcagtgagtggagatcgcatcactgcactccagcctgggtgacacaaggagactccatctcaaaaaataaaaataagaaatgcataaatataataaaacacacacgaatgacaaaggcacctgaattcccatcatcatttttctatttctctataattacttctttgatcctttatcttatccattaggcaatcagcctaaaacctcttccgtatttggctttctgtgagcatgagatcatatagaaaatgtgaaagcccgctgaatcctccagcacaaatcctggaatagagaaagtgctctggtcatcacaaaaaaaacttgccccctcacccaaatcccccatctcacccctacttccaatcacctgtggaaatacagatagatcatggggaggtaaatgctaatactccttggagtgagtccagatcttggaatcagagatcagtgccagcactagctcctgctcccctttcctactaattcacaggaggacaggtggtattgaagcaatagatagtcgagggggtggtccttcccccagcctctgaggtagaacagcagcctaacatgtgtctcccgagatcacaaagagtagcacatttcacacgggcttcaacactattttctggctgtttgacataagagaattctacttcgctttttttatattgatttcacttttgtttccttttcttggagaatgcaagttgtttaactcaagaatgccgtggatgtagaaatcctaaagcacattcgctgtgtatcaatcccagtccagtcttcccagagaagactctaaacacctcctggactgcacctgggcctatgccaattcctatcactcaccgtcactccagggagacagaacacacagagaatacgttacataggcaggttcattactaacagataagcagcgagtgacaacagaagcctacatttcaatgtgagccagttccccaaggctcagaaaagctgctcgagacatgtggagtcaccccatttgcagtgtagctgggggaagccagaaagcagcccagcctgggttttgtaccctggagccacaggaagcactcagctaaagcactgcatgacgtcctcctccaggaagaacaggaagacagcccaggctgttctgggacaatcctcctgatctcaggactttgctgtcttagtccatttttgttgctctaaaggaacacttgagcctgggtaacttctaaagaagagattggtttgcctcaccgttctgcaggctgtactggaagcatggcaccagcatctatttcttatgatggcctcaggccgctcccactctggcagaagggaaggagggtctgtctgtgctgagaccacagagatcacacggcaagagagggagcaagggggagggggagcaatggagcttccaagctctttttaacaaccagctctccaggaactaatagagagggaacttgctaaccccgtctccttgggacagcattgatctgttcatgatggatccacctccatgacccaaacacctcccaagaggcccaacctcccacactgggggttaaatttcaatgtgaggtttgaaggggtcaaacatctcaactaaagtagttgtatcctcagcacgttccatggttactatgagagctataactgagaaagcaggaggaagctagatctcccgccatctgggtgcttgtccgaaagagatgctgtaagtggttacctgtcaatcaagaaatgcaagacaattcatatagagaaactgctatgattagcttcttactggtgtctcctcttcttccaggtaaccccagacacctgcacattctgattgggacctcagtggtcatcatcctcttcatcctcctcctcttctttctccttcatctctggtgctccaacaaaaaaagtaagtctcacggggcacaggccagagagctcagggccatgtggggaagcaggatgggagcacacagctgtgtgttcctcactggcaggatggtccctggcccaagacaggagccacagaggcaggactttctagagagagcaccagactccctgcccctgccttcagctcacagaccgttgcctgattctgaactgtatcctcatgtcccctgcagccactcacatccaggagaaggttccatgacaggcagaaagtgggagacagaatcaatgggatgggaactcagagctattcatgggatgggtccttgagctcagagagatagaatgtctgagtctgctgttggcaactgagggacctcaggcacctatggcctccccctgtttgttggtatctgcttatgaaatgaggacccagaagtgccctccgagctcttttgttgacttccgtctcctacagatgctgctgtaatggaccaagagcctgcagggaacagaacagccaacagcgaggtaggtgctcctcggcccagcctcgtggctagtgttattcccaaacagtcctggaaaacgtgagcaccctccctcactcagcatttccctccctcactcagcatttccctctctccaggactctgatgaacaagaccctgaggaggtgacatacgcacagttggatcactgcgttttcacacagagaaaaatcactcgcccttctcagaggcccaagacaccccctacagataccatcttgtacacggaacttccaaatgctaagcccagatccaaagttgtctcctgcccatgagcaccacagtcaggccttgaggacgtcttctagggagacaacagccctgtctcaaaaccgagttgccagctcccatgtaccagcagctggaatctgaaggcgtgagtcttcatcttagggcatcgctcctcctcacgccacaaatctggtgcctctctcttgcttacaaatgtctaggtccccactgcctgctggaaagaaaacacactcctttgcttagcccacagttctccatttcacttgacccctgcccacctctccaacctaactggcttacttcctagtctacttgaggctgcaatcacactgaggaactcacaattccaaacatacaagaggctccctcttgacgtggcacttacccacgtgctgttccaccttccctcatgctgtttcacctttcttcggactattttccagccttctgtcagcagtgaaacttataaaattttttgtgatttcaatgtagctgtctcctcttcaaataaacatgtctgccctca

SEQ ID NO: 9 - DNA, 5973 bp, Homo sapiens
aaggtggagggaaggccgggcacaggggtgaaggcccagagaccagcagaacggcatcccagccacgacggccactttgctctgtctgctctccgccacggccctgctctgttccctgggacacccccgcccccacctcctcaggctgcctgatctgcccagctttccagctttcctctggattccggcctctggtcatccctccccaccctctctccaaggccctctcctggtctcccttcttctagaaccccttcctccacctccctctctgcagaacttctcctttaccccccaccccccaccactgccccctttccttttctgacctccttttggagggctcagcgctgcccagaccataggagagatgtgggaggctcagttcctgggcttgctgtttctgcagccgctttgggtggctccaggtaaaacggggatggcgggagggttgacctccagccccacaggaggggaccagcagggatctctgtggccacaaaggtcctgaggtccttagctctgtggattcttctaatcccttttttgggcagtccttccaccccgaaagcctctctgggcagagaagaaacagaaacccaagttcttcctgcaccctgtttctccctcgggaaacacccaggctccttctctacccctgcctctcggctcacgccccctccccttggcctctcttttgctcacctagtgaagcctctccagccaggggctgaggtcccggtggtgtgggcccaggagggggctcctgcccagctcccctgcagccccacaatccccctccaggatctcagccttctgcgaagagcaggggtcacttggcagcatcagccagacaggtatgcaccccaaacttgggcaacaggacctccgaatccagcactcaaccccacacccgtgccggtcctctgtcccctgccctgaggtgtcactccctctgaagccagtgacccagtctccctgccctcgcttgcaccgttcctgcccttgctctgcaatcagcgaccctcacgccagcatcccttctctccagaagtggatgcggccagtccaacagaggggtcgggcgtgaggggacggttggtggtcaagagaactcttggggcgggctttctcatcctcaacgggtggctgcctgcatcctcccgggcttcctacccctggagcttctcaactccattctctttcccgcccagtggcccgcccgctgccgcccccggccatcccctggcccccggccctcacccggcggcgccctcctcctgggggcccaggccccgccgctacacggtgctgagcgtgggtcccggaggcctgcgcagcgggaggctgcccctgcagccccgcgtccagctggatgagcgcggccggcagcgcggggacttctcgctatggctgcgcccagcccggcgcgcggacgccggcgagtaccgcgccgcggtgcacctcagggaccgcgccctctcctgccgcctccgtctgcgcctgggccaggcctcgagtatgtggggcgggacgatgggagaagggctgggaggtgggtccccatcccctgcctcccgggacgcaggaagggctggggcagaggctgcgccctaggccctgtcggagagctcccagaagagtagaggaagggggtgggcggcctgctggagtggaaggtgcccccgaagcacgtgtatggggggccctgtggagagattgtgtcacccccgagctccccttctcccacccacgcgggagtgcccagagggagggggagggggggagagcatggggctaaagtgattcatttcagatatctgtagctcagggggtgggcttcgcggggttccaggccaggaaaacggcaagggtggctgatgccaagtaaactccaggccagggacggggaaagtggtcctggggagtcttggggatccactttatgcacctccaggtgctggaagctgagatggggagagggtgatgtgggagaggagaagacaagtctaaagccaggtgcctgtttccaggagcttccggcttggcagccctgctgtgttgggaaattgtttccagtgggctgatgaagtcttctttatccttgcacagtgactgccagccccccaggatctctcagagcctccgactgggtcattttgaactgctccttcagccgccctgaccgcccagcctctgtgcattggttccggaaccggggccagggccgagtccctgtccgggagtccccccatcaccacttagcggaaagcttcctcttcctgccccaagtcagccccatggactctgggccctggggctgcatcctcacctacagagatggcttcaacgtctccatcatgtataacctcactgttctgggtaactcccccactctgcttcacatttgaccacaactccttcctgccccccttgtcacctcccctaactatgggtccccaaaccaggttctcggcagcgagtggcctacgtcattgctgtgggtctcactgttcgacccctttatattgctggcagcctcacagctgccatcaccccttcttgcttctcccgtggccttccagcgtcattgccggccttccctctccttccggctaagcccacttgctgggtttctgagcctcctcagctcatcaccttattctgctccttagcactcttatgagccagaccatctcctgaattcttctgcctcccttccttgcagccccagcactccctccccactgcagcacccagctttaactttgggttttcttttctcttcaggtctggagcccccaactcccttgacagtgtacgctggagcaggttccagggtggggctgccctgccgcctgcctgctggtgtggggacccggtctttcctcactgccaagtggactcctcctgggggaggccctgacctcctggtgactggagacaatggcgactttacccttcgactagaggatgtgagccaggcccaggctgggacctacacctgccatatccatctgcaggaacagcagctcaatgccactgtcacattggcaatcatcacaggtcagcctcaggtgggaaaggagtagctgccctcccagggtagaaaggacagggaggaagggctggcagggcaaagactaggcaaacccaccctgtgatgccaggccactgggcacaagttccagagcctgcccatctcggcccccacttttctcacccccataataaagaaacgaaactgaaaatctcctcttgagtcacaagataaaagttccaccgttctctatgggactcccctgctctcaattggcgggagggtctgggaagttagaaggaaaggtgacaaaaattctgaatggttcgaaagaggtagaatatatttctagaatccttgtctactttgcagccagggcttgggttagagttgcaggaagtggcctggatttgggaggagtgaataaatccgtcccttggtcagcaaatatttactgagcaagggttttccaagacagtataaaacaaacacagaaaaaagaatactcagagagtatgtgttgactggttgataactatcggccatgacagattagccatgtctgcagcacgcacctgcggccactcagtagtagcaccccacggcaggtgcttaataatgtatagagattgaatgaatacgtgaacatgctaatggataatacatctcctgaaggccaatcctgagttttcacttgctttctggatacctctaactagatgttataccacctctcagccgccttaccctgaaccccagctttttctcccaccaatccccttgctgactcagcctgtcagtaatccactggtatccatccacctcgaaacctggcctcctcctctctacatcccatcagtcatcaaagtccaccagttctttctgtccaatgccctcttgaaggtcaactgttttatgtagacggctcaatgagagagatactgttaccccgaagactttctcaaaacagctgggaagtgccagactctgggtctaaactcaggtgtctgcatcaccaaatcactctccaggacactactcagatgcccttcaccctttgtctcctcccacccacccatctctcactttacaacttggagaatgctctgtctctagatgaatgggtcagttccctgttctctataccttcagaaagggggatgatgttcattcagggggcaccacaaggcaggggacactgatgtgagccgcatcatggaagttccaaaattgtgaagtagatgggggtcagctcatctgactgattttgagggttctgagcatttgagtagaaagtaatgtaaaagaatctgtaatagtatttattctgtggtctgccagggccagtttgagtgtgaaggcagtagggagcctggaaatgttttgagcaggggagggagctgactagagcattgtctgaataagataaatgtggccggcagggcatgatggctcacacctgtaatcccagcactttgaaaggctgagacgagaggagcacttgagtccaggaattccagactagcctgggcaacatggtgaaaacgcatctgtatacaatttaataaaaaaataaatagaaagaaaaagatgaacgtggccatgacccatgatgtccttccccaacctcccctggccagaacccaagtgagtgcagggtgattgagacttggggttcaacctgtgatatcacgtaaggggggcagaatcccaaaagatctcttccttctactcttttcagtgactcccaaatcctttgggtcacctggatccctggggaagctgctttgtgaggtgactccagtatctggacaagaacgctttgtgtggagctctctggacaccccatcccagaggagtttctcaggaccttggctggaggcacaggaggcccagctcctttcccagccttggcaatgccagctgtaccagggggagaggcttcttggagcagcagtgtacttcacagagctgtctagcccaggtccgaggccccagaatgccaggacccaaacgccacagcaataatctttatcctccttccagaacagcccctgccacccccatcccagcgcttttctttccagtcagggacctgatctctggcttttgcctagggttgacccgtttccgccactgatcagctgaatgaccctgggacaagtcccttaaactctctggatctcattgcatctgtaaagtctgagagaatgacaaagtgtcctttctagtcctgaccctatgcctcatcctgtactttctccataggtgcccaacgctctgggagagccccaggtgccctcccagcaggccacctcctgctgtttctcatccttggtgtcctttctctgctccttttggtgactggagcctttggctttcacctttggagaagacaggtgagccagggacatggcaaccccgccccccagcagctcccgctcttccatcctcagagtgctgatggcaccccttcctcaggaaggtgaccaaatgggaccctgaacttgccctcagagccccccttcttcataagcctctcactccagggatggcttgtgcctgggtaggctggaaggggggttgggagaaagccaggaccagatggggagggcaggggcgctgagaaaaaatagagggactcagtgtccctcctcatccgcttcccttcatccttctcctccttccgccctccgtctctctctccatctcttctcacagtggcgaccaagacgattttctgccttagagcaagggattcaccctccgcaggctcagagcaagatagaggagctggagcaagaaccggagccggagccggagccggaaccggagcccgagcccgagcccgagccggagcagctctgacctggagctgaggcagccagcagatctcagcagcccagtccaaataaactccctgtcagcagcaa

SEQ ID NO: 10 - DNA, 9028 bp, Homo sapiens
acagtttcccttccgctcacctccgcctgagcagtggagaaggcggcactctggtggggctgctccaggcatgcagatcccacaggcgccctggccagtcgtctgggcggtgctacaactgggctggcggccaggatggttcttaggtaggtggggtcggcggtcaggtgtcccagagccaggggtctggagggaccttccaccctcagtccctggcaggtcggggggtgctgaggcgggcctggccctggcagcccaggggtcccggagcgaggggtctggagggacctttcactctcagtccctggcaggtcggggggtgctgtggcaggcccagccttggcccccagctctgccccttaccctgagctgtgtggctttgggcagctcgaactcctgggttcctctctgggccccaactcctcccctggcccaagtcccctctttgctcctgggcaggcaggacctctgtcccctctcagccggtccttggggctgcgtgtttctgtagaatgacgggtcaggctggccagaaccccaaaccttggccgtggggagtctgcgtggcggctctgccttgcccaggcatccttggtcctcactcgagttttcctaaggatgggatgagccccatgtgggactaaccttggctttacgacgtcaaagtttagatgagctggtgatatttttctcattatatccaaagtgtacctgttcgagtgaggacagttcttctgtctccaggatccctcctgggtggggattgtgcccgcctgggtctctgcccagattccagggctctccccgagccctgttcagaccatccgtgggggaggccttggcctcactctcccggatcgaggagagagggagcctcttcctgggctgcccgtgaccctgggccctctgtgtacactgtgaccacagcccgctcctggaccctctgtgcccggctggccctctgtgcccagccagcctgcacctggggatgccaaggcctggggagggtggtttcacccaggccaagcctaagacagtccctctgggccctgctgggtaccggggtgtgacaccactgggaggacaagatgaggggcacccctggggccgccctgacaccccctcgaggctcctgccccgggggtcctggtgccccttcactgtggcaggcgactgggggttccccacctcggcccctctcccggggcctgctccccggcacctgaggcagcatccttgtcagggccgtgccttcctgcctcagcgccacctcttaaggttggcccgtgggtcactcaggactcagaactggagattctgggcaaaaggcaaagagcaaagggccaaaaggcatcccagggagacgactgcgggggaaccagagggcagaggggcgctcgtcacaggggagggggagctgagcgaggcaggaggggagccgagcctctccccccgtgtcccggctcttcaggcacgccctcgggacgccaccctccccgacccaggcgggaaagataagagcaaggtgtccgcagcctgacactcgtgcctcaggtgcccgcgcttgtgccggacaagactctcacaggtggcatgcctcggtttccccactggtaacagcacagggcactcagcaaggcgcagtgggcatgactggggtcctgtgggtcctgacccagatgtggccaccccggccgcagtggtcttcattccaggatgcctcttttccctcctgatctattcactgcgttcgccattcggtcattcccggggccaccactcccacctcaggtgtgtgcttcccttgtgttttatgagatatccccaacccggctgcttattggccccgtccgagggcaggagcataaataagagcctctgctttggcgtgggaccactgtgagctccagtcagcgctgccactgctgagctctgggccttcgacaggacttggccccttactgacttctccgtgtgctttgggtcatgggtgaggacgcctcctggcaaggctgcgtcctgaggattaaatcgggtcatctgtgaaaactacccagcccagcccctgacacttttttgtttgtttcttttagtgacagggtcttgctctgtcacccaggctggagtgcagtggtgtgatctcggctcactcgacctccggggctcaagcaattctcccacctctgcctccagagtagctgggactataggcacgtgccaccctgccaggctaatttcttccattttttttagagacagggtctcgctatgttccccaggctgggctcaaatggtcctcccacctcagcctccccaagtactgggattacaggcataagccactgcatctggcctccatgacacatatttttaaagtctgatttttaaagtcaaacttttgaagtcagattttaaacggactattttgaaaaatatacaaaaacgtttaaaaacaatgaatatccctcacctagaatcaataactaagaatattgacacatttgctttggggactgggcggctggagctgccatgacaaagctccgccgaccgagtggcttttaaacagagcctgccctctcgccgactgagggctggacgtgcaggatggagctccgcagggtcggctcccctgtgctctgaggggctctgctcagcctctcccggctgtggcttaaaaacagagcctgtcctcccgccgtggggggctggacatgcaggaccgaggggccacagggtcggctccctgtgctccgagagggctctgctcagcttctcctggctggggggttttgtggccaccctctgtgttcctgggttcagaagcatcccccaggctctgccttcatctctgcacgggtgactctgtacaggaagccaggcctgctggtcaatggccacccagccctgtgccctcatcttacctagtcccagctgccgtcaccctattcctaataaggccgccttctgaggtcatggggttaggacttccacataggaatctgtggggacacggttcggcccacagcccttcccacctccacacacacacacgactgtgaggagttggaagacctcactcctcacccctgccaggtcctctagggacaagctcgctgtcctcatcccagcacagcccgtgggacggtttccttgtccctaatgggaccacggtcagagatgccgggtctggtctgggccagcaggttcctccgcccggggcaggcagccttcttctgtgcgcttctggaaagcaatgtcctgtaatgcggtctctctgcgggagcacccccaccgccacctcacaggcctgttccacagccccgggatgggctctgtctccctcctgaccctgcatagggcacagccctctctcatcaacccacgatcctacgtggatccgagagggagcacctggggaaacaatggaatcccatagaaacaccccaaatctaacttgatccaggaccagccagtggtcacttctgaatattcaccttcctagtagacactaccagccaagggaggccaggaagccttcctggaggaggtggcctgaggactggggtgaggcaggccctgcgtgggggtcgccacccagcacccccacactgggtgggagccagtctctgagactggctgggggaggtgggagagggggctgcttgaactgcagacaccgaggtctagcccccaccccacccagccagttggtggaggcaggggaggccgaggggcccagctggacctgctccccggggtggattccaaaataggggggttggggggggcggaacaggagcccagggtcctggcttgaggcccagtggctgagggctggtgcaagccagacaggaaaagggttgagcctgtcagcgccagcacagatcaagtcaggagcaggtccctccaccaatgtgtgcaaataaatagcagctaagtttccagttacaagaacaatgcacagatggtcccagggacattgcggtgtggacacacagcggccattgtcctgtcgccagcacctcgccctacagctggggggtcccttagcacttcctagccatgcagggtccctgctcacagtacccgtgatgacttctgttcctcacctgcctgtctgtcccgacagctgcatggcagccctggcctgggagatggagaccccgaggggctgcctgcggtggtggggcccctgggtccccactgcattcccagaaacccagagggcagggcatttcccctgctctgtgccgagtccacccagccccagcctaggcccagtaagggctgcagcccaccctgtcccaggctgcctcccaggagccctcttggccctgatgccagaagcccatcttcctccattcaggcaggtctctgagtgccctggcctggctgcctgctggccctgagagtcacactaccccacagccctccttggtcaaaatccactctggagtggctggaagattccccgggcccacgccgcacacgcctatgcagggagcttcccctggccggccggcagacaagggcggtctcagagagggggctcacctcagcagccccttgtgtagctggccctcgcccctgccacctctgggaacaccaccaggaagctgggggacaggcacgcaggtgaaggaggcgagcgcttgtcagccgggaggccatgggcacagagggaacagggacaccctgggtggcctcaaggtcacttcaaacccctcactcgtcccctgggagggtgcccagtgaggttggcactaggagttggtcctggtcacatgacagacccacccacctctggtgtccagccagcacgccgtgggccagcctggctgcagggacacgagggcagcagccccctcctcctctgagctggttgctccttgagtcatcaccaccgcctgccacggaggccgcctgtcccaggaagcagagggaccgcagctgtggcaaccagggcctggtctctgtgtcacctcgctggggggccgtgcccaggcctgagacggaactgagtgacagtgcactgggtctgacagtgtggggctggcgccatgtttggggaaccctgtggcatgggacctgtgggtgagccgggaaaatcaccccgttgcatggcatctcgggcctggatcttaagcgcctgtgttggtgcctccgcctggcggaagagccgcgacccccacgttgccatgcgggtatcccaagccctgaccctggcaggcatatgtttcaggaggtccttgtcttgggagcccagggtcgggggccccgtgtctgtccacatccgagtcaatggcccatctcgtctctgaagcatctttgctgtgagctctagtccccactgtcttgctggaaaatgtggaggccccactgcccactgcccagggcagcaatgcccataccacgtggtcccagctccgagcttgtcctgaaaagggggcaaagactggaccctgagcctgccaaggggccacactcctcccagggctggggtctccatgggcagccccccacccacccagaccagttacactcccctgtgccagagcagtgcagacaggaccaggccaggatgcccaagggtcaggggctggggatgggtagcccccaaacagccctttctgggggaactggcctcaacggggaagggggtgaaggctcttagtaggaaatcagggagacccaagtcagagccaggtgctgtgcagaagctgcagcctcacgtagaaggaagaggctctgcagtggaggccagtgcccatccccgggtggcagaggccccagcagagacttctcaatgacattccagctggggtggcccttccagagcccttgctgcccgagggatgtgagcaggtggccggggaggctttgtggggccacccagccccttcctcacctctctccatctctcagactccccagacaggccctggaacccccccaccttctccccagccctgctcgtggtgaccgaaggggacaacgccaccttcacctgcagcttctccaacacatcggagagcttcgtgctaaactggtaccgcatgagccccagcaaccagacggacaagctggccgccttccccgaggaccgcagccagcccggccaggactgccgcttccgtgtcacacaactgcccaacgggcgtgacttccacatgagcgtggtcagggcccggcgcaatgacagcggcacctacctctgtggggccatctccctggcccccaaggcgcagatcaaagagagcctgcgggcagagctcagggtgacaggtgcggcctcggaggccccggggcaggggtgagctgagccggtcctggggtgggtgtcccctcctgcacaggatcaggagctccagggtcgtagggcagggaccccccagctccagtccagggctctgtcctgcacctggggaatggtgaccggcatctctgtcctctagctctggaagcaccccagcccctctagtctgccctcacccctgaccctgaccctccaccctgaccccgtcctaacccctgacctttgtgcccttccagagagaagggcagaagtgcccacagcccaccccagcccctcacccaggccagccggccagttccaaaccctggtggttggtgtcgtgggcggcctgctgggcagcctggtgctgctagtctgggtcctggccgtcatctgctcccgggccgcacgaggtaacgtcatcccagcccctcggcctgccctgccctaaccctgctggcggccctcactcccgcctccccttcctccacccttccctcaccccaccccacctccccccatctccccgccaggctaagtccctgatgaaggcccctggactaagaccccccacctaggagcacggctcagggtcggcctggtgaccccaagtgtgtttctctgcagggacaataggagccaggcgcaccggccagcccctggtgagtctcactcttttcctgcatgatccactgtgccttccttcctgggtgggcagaggtggaaggacaggctgggaccacacggcctgcaggactcacattctattatagccaggaccccacctccccagcccccaggcagcaacctcaatccctaaagccatgatctggggccccagcccacctgcggtctccgggggtgcccggcccatgtgtgtgcctgcctgcggtctccaggggtgcctggcccacgcgtgtgcccgcctgcggtctctgggggtgcccggcccacatatgtgcctgcctgcggtctccaggtgtgcccggcccatgcgtgtgcccacctgcgagggcgtggggtgggcttggtcatttcttatcttacattggagacaggagagcttgaaaagtcacattttggaatcctaaatctgcaagaatgccagggacatttcagagggggacattgagccagagaggaggggtggtgtccccagatcacacagagggcagtggtgggacagctcagggtaagcagctcatagtggggggcccaggttcggtgccggtactgcagccaggctgtggagccgcgggcctccttcctgcggtgggccgtggggctgactccctctccctttctcctcaaagaaggaggacccctcagccgtgcctgtgttctctgtggactatggggagctggatttccagtggcgagagaagaccccggagccccccgtgccctgtgtccctgagcagacggagtatgccaccattgtctttcctagcggaatgggcacctcatcccccgcccgcaggggctcagctgacggccctcggagtgcccagccactgaggcctgaggatggacactgctcttggcccctctgaccggcttccttggccaccagtgttctgcagaccctccaccatgagcccgggtcagcgcatttcctcaggagaagcaggcagggtgcaggccattgcaggccgtccaggggctgagctgcctgggggcgaccggggctccagcctgcacctgcaccaggcacagccccaccacaggactcatgtctcaatgcccacagtgagcccaggcagcaggtgtcaccgtcccctacagggagggccagatgcagtcactgcttcaggtcctgccagcacagagctgcctgcgtccagctccctgaatctctgctgctgctgctgctgctgctgctgctgcctgcggcccggggctgaaggcgccgtggccctgcctgacgccccggagcctcctgcctgaacttgggggctggttggagatggccttggagcagccaaggtgcccctggcagtggcatcccgaaacgccctggacgcagggcccaagactgggcacaggagtgggaggtacatggggctggggactccccaggagttatctgctccctgcaggcctagagaagtttcagggaaggtcagaagagctcctggctgtggtgggcagggcaggaaacccctccacctttacacatgcccaggcagcacctcaggccctttgtggggcagggaagctgaggcagtaagcgggcaggcagagctggaggcctttcaggcccagccagcactctggcctcctgccgccgcattccaccccagcccctcacaccactcgggagagggacatcctacggtcccaaggtcaggagggcagggctggggttgactcaggcccctcccagctgtggccacctgggtgttgggagggcagaagtgcaggcacctagggccccccatgtgcccaccctgggagctctccttggaacccattcctgaaattatttaaaggggttggccgggctcccaccagggcctgggtgggaaggtacaggcgttcccccggggcctagtacccccgccgtggcctatccactcctcacatccacacactgcacccccactcctggggcagggccaccagcatccaggcggccagcaggcacctgagtggctgggacaagggatcccccttccctgtggttctattatattataattataattaaatatgagagcatgctaagga

SEQ ID NO: 11 - DNA, 23406 bp, Homo sapiens
agaacacttacaggatgtgtgtagtgtggcatgacagagaactttggtttcctttaatgtgactgtagacctggcagtgttactataagaatcactggcaatcagacacccgggtgtgctgagctagcactcagtgggggcggctactgctcatgtgattgtggagtagacagttggaagaagtacccagtccatttggagagttaaaactgtgcctaacagaggtgtcctctgacttttcttctgcaagctccatgttttcacatcttccctttgactgtgtcctgctgctgctgctgctactacttacaagtaagtctcggcatggatatttacaatgacataatggtgctgtacagaggacaagggagagatacaaggatggccattgtaatgttgtttgtaatagcaaaagcttggaagcaacctaaatgtccgtcgatgagggagtgggtaaataaatgtgatataatcatgatacaaacagtgagtctgacaaaacatactggtatagaatgtctcaaaattataatgttattaaagaaaaaaagttgcagaataatgcatatattaggcttctatttgtgtgtgtgcattgtcggggagcaggaatatgtggacatttcttaatgtataagctctaggaaaaggaaccagggaatggtaaagagttgggagagtaaggcatatttttcttttcttttctttcctttttttctttttcttttctttctttttctttttttcaattgagatggagtctcactctattgcccaggctggagtgcagtggtggcaccattttggctcactgcaatctccgcctcccaggttcaagtgattctcctgccttaggcaccggagtagctgggatcacaggcgtgcaccaccacacccagctaatgtttttaatttttagtagagacagggttttaccatgttggtcaggctggtctcaaactcatggcctcaagtaatctgcccatctcagcctcccaaagtgctgggattacaggcgtgacccaccgtgtgcccggccactttttcatacacctttgatagtgtttgaatgtttttactgtagttgagtcatatgaaaacaaaggggacataaaaaatcaaaagaaaatatataatgaatgttttatcatatataaaatatatatagtttttttttaatggaattaactttgtcatttgaggaaaatgaggagacaagtctcaatcattttaggagatttgtttgccaaagttaaggaggcacctgagagacaggtctatgactttctcagaagatgattttgagggctccagatttaaaggggacaaggtgggatattgagaagcactcagttttcacataaaaaaggggggggggcagaggaaaaatatggggaatctgcattttacattagataacacagacaaaatggggtagggaaacaatcagataacgcatttgtgtctggccagggtgaccgcaccggtaaagatgagctatcaatctgcattgcacagctgaccaggaatttccttgtgggcaaaatatgggggaggtatgcagcctttcatcctgtagccatcttattcaggaatcaaaaagaggaggcaggtttctgtgacccagttcccagcttgacttttccctttgactgaatgagtttggggtcccaaaatttaatttcttttcacaactttaaaccttaaaacaactccatgagtagtttcaaatacacaagatccttatttaaccaagggtttgtatttactgtgcacttgctgcttaaaaagagaagtatgttaggagagcctccctttgttgatgaacaagcaagtagcccagatgggcgggccgtttcctggctgaccatgactaattttctgattgtctgtttccatcagccctgttctcccgtgttcacagaattgggccacaattctctcctagggcagtgtttctgaaagtgaggttctgagaccagccacttcagcaacacttgagaacttgttagaaataaaagttctcaggctctaccacaggccaactgagtcaggaactctagcagttgagcccagcaatctgtgttttcgcaaggcttcccagtgattctgatggccttcacatctgagaagcattgtcacagcgaatcatcctccaaacaggactgcagcagtagcttcctctttattctgtaagacatggcttgcagttttcctgaaatggagtaacctcactcaccgcttgagtcttggctctccttctctctctatgcagggtcctcagaagtggaatacagagcggaggtcggtcagaatgcctatctgccctgcttctacaccccagccgccccagggaacctcgtgcccgtctgctggggcaaaggagcctgtcctgtgtttgaatgtggcaacgtggtgctcaggactgatgaaagggatgtgaattattggacatccagatactggctaaatggggatttccgcaaaggagatgtgtccctgaccatagagaatgtgactctagcagacagtgggatctactgctgccggatccaaatcccaggcataatgaatgatgaaaaatttaacctgaagttggtcatcaaaccaggtgagtggacatttgcatgccatctttatgaataagatttatctgtggatcatattaaaggtactgattgttctcatctctgacttccctaattatagccctggaggagggccactaagacctaaagtttaacaggccccattggtgatgctcagtgatatttaacaccttctctctgttttaaaactcatgggtgtgcctgggcgtggtggctcacacctctaatcccagcactttgggaggctgaggccggtggatcatgaggtcaggaattcgagaccagcctggccaacatagtaaaaccttgtctccactaaaaatacaaaaaattagccaggcatggttacgggagcctgtaattctagctacttggggggctgaagcaggagaatcacttgaacctgggagtcggaggttgtggtaagccaagatctcgccattgtactccagcctggctgacaagggtgaaactctgtctcaaaaaaaaaaaaagaaaagaaaagaaaagccaaaactcatgggtggaatgtatagatgggatgaaaggcctagatcagtggttagagaccctgactctcattagaatcacatagagagtttttaaacaactatagatgccaggtacagtggctcatgcctataatcccaatactttgagaggctgaagcaggaggatcacttgaggtcaggagtttgagaccagcctggctgatatactgtggctacccctatctcttaaaaagcagaagaaaaaaccccactaccaaaaaccagagaaatcagcatctctggaggtagatgctaagcattagctttttacagagtctacctcaggtgattttaccccaggtgcagccagcatggtgaactgctgggttatgcatgtatgctgggaggtgaacagacttaagatttctataacatgtactttgtgcccagatagagctgagtttacatctaactctgcctcttactagctatataatcctgagcaagttattgaaacgctgtgagctcctcttctataaaatatgacaataataccgatcatgtgggccattagaaggattttatgtgataatattttattaaaagcctttataggttgggcatcccaaatctgaaaatctaaaacctaaaatgcaccaaaatctgaaatgctctaaaatccaaaactttttggacactgacatgacattcaaaggaaaagctcattggaacataagtataggcagatactaaaaaataaaaaaataaaaacatggctgggcgtggtggctcatgcctataatcccagcactttgggaggctgaggtgggtggatcacctgaggtcgggagttcgagaccagtctgaccaacatggagaaaccctgtctctactaaaaatacaaaattagccaggtgtggttgcacatgcctgtagtcccagctactcaggagtctgaggcaggagaattgcttgaacccaggaggcggaggttgcagtgagccgagattatgccattgcactccagcctgggcaacaagagcaaaactccgtttcaaaaaaaaaaaaaaaattcaaaatctaaaacatttctgatctcaagcatttcagataaggagtcttcaacctgtaattatggccatttgtgtggctgttagttccgctattaataatcagaatgtaacaatgatgactgcatcttacctttgtcaaacatttgaagtgtgtgatacactctcaacgtaggtatccaggcaggtttggaagctgagggtgtatttctctttcttaattgtctttcgcatttttttcttgctgcccctttgattccctgaaataagctttctgctctcagataattttcatccttatgttgtttctgacattagccaaggtcacccctgcaccgactcggcagagagacttcactgcagcctttccaaggatgcttaccaccaggggacatggcccaggtaactatgcatggggcagaggagggaatctttagctggctctgaattcagaggattttgaatgtgggaaaaaaagatgagaaaacagtgtgagagtggaggcatggatatctccgtgcacctgaaatagtgtttgaaaagagggaagtggtggagacacacctgtgctgggaaaaagatggtctggcttaggattattttacttaaattttaactggaaaaaagttaataaactttatagtctttaattttacttaaatattaactaaattgaatgaaatgctcattactttgtccacattttctgactgaccctggactggtgatgtttggtcatgaactggtgtcagtctgtgtttgggaactgacacattggattaggtgatttctaggatgccttctagctagaataaagcccatcaccttccctggattccagccacagaaagaatagttaaattcttcatgtaattcagcaaggacgtactcagggtgctccagaagagaacactgggcataaagcagaagtcaagtcacattgatcatgaaggttaattttaaggtatttcttgtcagtgtcctggtctcttctaaactctctggagctccattttttttttcttctgtaaaatgaggttaataggtgagtcccacctcataatgtcataaatctcataaatcacaccttatgggctttaaataagaaaatgtctaaaacgtttatcccaatgtctgaccacaatttgtacatgttagctgttgtcgttaatattataagatcaggaggcacagtgagattgtggttaaagtacttcagtgacaggtggaatgggttctaatttcagctgttcttgatagctctgtgacctcagtcaagttgctcaaattctctgaagctcagtttgctcatctctacaatgaggataattccagtgcccatgtcatgaggtggttgtaatgtataaacatgataatgtatgtaaaatgctcagcatagtacctggcccataaaaagcactcaactgtttattattactatagttactggttttagctctccaaagtttcagtctttggttagtctttagtgattggtagccaacatcttttatgcaattagagaggaaactaaatatggtggggacagaaaataataaagttataccagatacttattgtatgccattgttatattttaaagaatcttacaaccatagtgctagaagggacttcaagggtcatttagtctcactttcccatcctgtgcttcagtacttttttttttttttttaattgagacggagtcttgctctgtcacccagactagagtgcagtggcgcaatctcggctcactgcaagttccgcctcctgggttcacgccattctcctgcctcagcctcccaagtagctgggactacaggcgcccaccatcaagcccagctaatttttttcttttttgtatttttagtagagacagagtttcaccgtgttagccaggatggtctccatctcctgaccttgtgatcctcccgcctcggcctcccaaagtgctgggattacacgcgtgagccaccgcgcccggccagtactttttactacatcaccactgaatgggcatttgctgtagacggagttcactccctgtcgaggtggtgcatttccttatacttgtctctaccacagacagaagtcttctttcctttagtttttctttcctttttttttttttttgagacggagtctcactctctcacccaggctggagtgcaatgacacgatcttggctcactgcaaactctgcctcccaggttcatgccattctcctgcctcagcctcccaagtagctgggattacagacgcgcgccaccacgccccgctaatttttgtatttttattagagacggggtttcaccatggtggccatgctggtctcgaactcctaacctcaggtgatccctctgcctcggcctcccaaagcgctgggattacaggtgtaagccaccacgcccagccttccctttagtttttgtttgttagttccttccctctagggcaacaaaaatgggaatataggaataatacctcgaacctctgagcttctcaagggcctgactgagaaaaaatattgaaacaaccaaaaataggtcagtagctcctaaataggaaaataaaataaaaaattgaaatgaatgaatatttaatggtttgtctataatatgtaacattatgtaaattggctgctggcaaaccaactctaaatgtgggatgtgggagcatttaatataaaaatggggctgggcacagtggctcacatgtgtaatcccagcactatgggaggccaaggcaggcagatcactggagctcaggagttcaagaccagcctgggcaacatggcaaaaccccatctctactaagaatacaaaaaattaggctgagtgcagtggctcacacctgtaatcccagcactttgggaggccaaggcagatggatcacctgaggtcaggagtttaagccagcctggccaagatggtgaaacccctgtctctactaaaaatacaaaaattagctggtcatggtggtgcatgcctataattccagctactcaggaggctgaggcaggagaattgtctgagcctgggaggagtgaaccgagatctcaccactgtcctgaagcctggaaaacagagcgagattccatcccaaaaaaaaaaaaaaaaaaaaaaatagccgggcatggtggcatgtgcctgtagtcccagctacttggcagggctgaggcaggaagattgcttgaactcaggaggttgaggattcactgagccgagttggtgccactgtactccaaacctgggcaacagagcgagaccctttctcagaaaaaaaaaaaaaaaaaatggagtagagcctttaaaagtaagagatccaagggcctggaatttgaacacagaacaaatgcaacttgtcttctacctgaaggagtaaggactgggtcacaggtgagtcctcagctctagagtagatctgctttaaatcctagctttcccaattaatagctgtgtgatcttgggcaaagtggctctctcagactcagtatcttcatctgaaaaatggggaaaatagtagtacctacttattgtggttgaggattaaatgagattgtatgtatatggtgctaagcaccatgtctggcacctaataagtaccaaatagatggtaactactaaatttatacactgttaaggccatcacatctcacctccgctgctacctgccccaccaggcaaatcttggtttctccagaaagaacattgccactcccttcaactgtcccatccatcttggttggtggccaaatctgtgtgaaaaaaagctgtaatgacacaacagtgcttgattttactgatcattttcatagcaaaatgaagtttttaaaaagttagttttaccatttttatcaagaaaaataattataaggagtctgaaactggatttacatttaaaatcttatgtgcacttaagattcatgtttacttagcagttgtactgatgagggtcttttttttatttttttgatatggagtcttgctctgtcaccaggctggagtgcaatggtgtgatctcggctcactgcaacctccacctcctgggttcaagcgattccactgcctcagcctcctgagtagctgggactacaggcgtacaccaccacgcccggctaattttttgtattttagtagagatggggtttcaccatattggccaggatggtctcgatctcctgacctcgtgatctgcctgccctcggcctcccaaagtgctgggattacaggtgtgagccactgcaccaggcctgtggtttttatattttaaatttttttctggtaattagggcaaaagtaattggaacataatctttttttcttcaataattttaggctgaggctatgcctttataatatttaaactatagtttgctaaaccagcatttagtcaaaccctttatacacattaaggcttccagaaggtgacagtgacatttaagaagtttcaacatctctgactcagccataaaaatgagtaagcatgcttagttttccaaaagctggcaatgtacttatttttagaattcagtgttcatgaggtcagggcctgtgcccctcttgtttcctgctctgtcccctgtgcctagagtaagggcatagtgcatattcatggaatggatcagcagatgaagaaataaacaaatgaacaggaaggaaagatggtgagtgggtggctgggcaacgtgaccctcttcataatgacagcactgaggtaagggctggtgaaggcagtataattaagaatgtgcatttaaggctatgcagacctaaattggaaggccattttgtcatttgctaagtcatgtgaccttgggttagtcacttcacttccctaattttcagtttcttcatctgtgcaatgggactaacagtctctactttagaagcgtagttctaaagtaagtgcttctaagtatctctaaaatgagcttcttcactgaaagagtttatttagcacaaggcctggctcctattacattgtgaccacagtgattattttcatttgttggcaaccctgtctcccttctcatgagtaaatgcaaaacttatttaagaaaatggaggctgggcacggcacggtggctcacgcctgtaatcccagcactttgggaggccgaggcgggtggatcacttgaggtcaggagttcgagactagcctggccaacatggcgaaaccccgtctctactaaaaatacaaaaattagctgtgtgtggtggtgtgcccctgtagtcccagctaccagggaggctgaggcaggagaatcgcttgaactcaggagatggaggttgcagtgagcagagatcatgctactgcactccagcctgggtgatagagtgagattctgtctcgcaaaaagaaaaaaaagaaaaagaacatggaggttgcagtgagttgagattgtgccactgcactccagcctgggcaacagagtgagactgtctcaaaaaaacaaaaaagaaggaaatgaatttttgttgtcttttaaaatctaattagaatataatgcctgaggccaagcctggtcgttcacacctgtaatcccagcattttgggaggctgaggtgggcagatcacctgaggtcaggagttcacaaccagcctggtcaacatggcctcgtctctactaaaaatacaaaaattagctgggcgtggtggtgcatgcatgtagtcccagctacttgggaggatgagggatgagaattgcttgaaccagggaggccgaggttgcggtgagctgagattatgccactgcactccagcctgggtgacagagtgaaattctgtgtctaaataaataaataaataaataatgcctgagtcttatcaatattgctagatgtttgtagaactcattagggtcctgtgaaaaaaacaaagcacatatttaatgtaggacttcctggcagaagtctctatttcataaaacagtacggttcattatctagatgaaaaaatgtggccatcctaaagttgattcctgggtgttcagtaaattttgtctgtctctccattaattattgtgacaagtacggagtagaattcatttcaaataggattataggcatcattaagattttttaaaaacttagataaaagaaaacgttcttaactatactattggctatttttcctctctctctctctctctctctttttatagcagagacacagacactggggagcctccctgatataaatctaacagtaagtaactttttttgtgagctatgttgtactcaacttggaggggaaatcatggctttagacttccttcatgcccaccttgtccttggggtaaaaagccttaagttcccttagcttcagattcctgggctgtaacatgttgatgatgacagttctaacctcataggcctgctgtaatgaaggactgacatgatgtgtgtaaagtgcctggcatatagtaagagcttgaaaaccacaaagaagaaacattagcattttgtccctcttattcttcaatttcacaactgtctaccctgtggaaggttcaaagattcttcatctccctagaataccattcttcttgcttccattgcaatcctaatgggaaagagtatttaaatttatctctttaaatatggcaagacaccagtcaggaatattcaaagtgaagaggttttttttttttttttttagacagaatttcgctcttgttgcccaggctggagtgcaagggtgtgatcctggctcacctcaacctccgcctcccgggttcaagcgattctcctgcctcagccttccgagtagctgggattacaggcatgagccaccacacccggctaatttttttatttttagtagagacggagtttcaccacattggccaggctgatcttgaactcctgacctcaggtgatccacctgcctcggcctcccaaagtgctgagattgcaggcgtgagccatggcacctggcctaattttgtatttttagtagagacagggtttctccatgttggtcaggctggtcttgaactcctgacctcaggtgatccgcccaacttggcctcccaaagtgctgggattacaggcatgagccatggtgcccagccagttttatgtatttaactataaataaagccataccttaataaacctcaattttactgtccctgctaccttctcagaataaaagaaaaactggctgggcgcagtgactcacgtctgtaatcccagcactttgggaggctaagtagggtggatcacctgtcaggggtttgagaccagcctggtcaacatggtgaaaccccatctctactaaaaatacaaaaaattagccaggtatggtggtgtgtgcctgtgtagtctcagctactcaggaggctgagacaggagaatcgcttgaatccaggaggtggaggttgcagtgagctgaggtcgcgccactgcacaccagcctgggcaacaagagcgaaattccctcataaaagaaaaaccactagaaggcaagcttgcagcaatgacttaaaaattctttgaggaggccgggcacagtgtctcatgcctgtaatcccagcactttaggaggccaaggtggaaggaatgcttgagaccaggagtttgagactagcctgggccacatagtgacaccctgtctctacaaaaaatattttttaaaatttggccaggcatggtgctgcaaacctgtagttccagctacttgggaggctgaggcaggaggatcacttgagcccagtaggttgaggctgcattgagctgtgatcatgcccctgcactccatcctaggtgacagggcaaggccttgtctcaaaaaaaaaaaaaaaaaaaaaattacttgagggcatatccaggagcccacatttatttgactcagtttcttgcttgtgtattcacaactgatgctcagcatcttgtatttgctccttctctctttgcaatcaaacagtgctttttaaggacctgtatgtgcccacaatgcttaatgcacaatatcttgcatataggactcctgttattgcaggagtaatgtgtattgaatcaatttgtaaatgtatattgaataaatggaagatttaacttccttaaattcattgttttaaaaatgcttataattatatgtgtgtgtgtgtgtgtgtgtgtgtgtgtgtgtgtgttttgtataaatggggtctcaatattattaggctggtccctaactcctggtctcaagtgatcctcccatctcagcttcccaaagtgctgggattataggtgtgagcctggcctataattattatttatttattaatttattatttatttttgagatggagttttgctcttgtcgcccaggctggagtacaatggcacaaccttggctcactgcaacctctgcctcctgggttcaagcgattgtcctgcctcagcctcccaaatagctgggactataggtgcccgccaccacacctggctaatttttgtatttttagtagagatggggtttcaccatgttggccaggctggtcttgaactcctgacctcgtgatctgcctgccttggcctcccaaagtgctgggactacaggcgtgagccaccgcacctggcctaatcattgtttttaaagagagaaaaagagagaacccatagactgaaattttagaaacaggatttattttgtgtggctctcagttatcagaaaatcaagttaactagagcaatagcaataatagctacgattgattgaacatttattatgtaccaggccctgtactaagcattttatattttctctcacttagttttcctgataactctacaggattactcagcccttagtggcagagctgggaattttttttttttttttttttttgagatggagtctcgctctgttgcccaggttggcgtgcagtggcatgatctcaactcgagtactccagtctttgcctcctgggtttaagtgattctcctgcctcagcctccccactagctaggattacaggcatgtgttaccacgcctggctaagttttgtatttttagtagagacggggtttcaccatgttgtccaggctggtctcaaactcctgatgtcaggtgatccgcctgcctaggcctcccaaagtgctgggattacaggcattagccaccgcgcccggcctcagagctgggatttgaatccacgaccgtctggctgtaaagtcttggctattgaatcactgtctttttgtgaaaaatagacgtttcatagcaagacactaaatgtaaactactctaaaactctctggggaatcttaggggatcttgaaccaacaagactccactctaaagccaatttttgcaggggcagggaaagggtcttaagagctccttctctctttttttttttttttttttaagagctccttctctacccacaacacagaagggcacattttgtttccttgctaactccaaaggttaagggagaccctttcttgggttggcttgagtgttggctacaaggtgacagatcaaaggtgatttgaaggactcagccatcctgtgatgttgtaaaagggatggtccaattcacaaatcttgaagctgattacacaagcgatttctagctgttttctgcttaaatcctgtttgtgtttccatagcaaatatccacattggccaatgagttacgggactctagattggccaatgacttacgggactctggagcaaccatcagaataggcatctacatcggagcagggatctgtgctgggctggctctggctcttatcttcggcgctttaattttcaaatgtaagtgtttttgtttctctctccctctgataacaaattcttcagtgagaaccagtaaaaacctagatagaaatgcaaattcatgtttatacccaaagatgattagactaaatacccttttgtccatccaaatcctaacaataatggctaatttttatttaatatttattgtgtgtcaggcagccactgcgttaaatgttttacatacattttatcatcattactgtcttatgagataaggaatagtaccatccccattttacagtgaagggaagtcaagcttagagtaagctgccttcccgaggtttcaacatcagtacctggcagaaccggaaatcaaatccaggcaggctgattccagtaaactaatttctttaattcatgaatatgtctaggtttgttacgaaacacaacaacaaaaaacacttccttctgtgcacttttctgttattggtttctcaggcatacctctctggcagtagactgcaagtccctttaacactgggtcgtgactggggttagagaatgttttcctccatcatggtacttagcacatagctttttctaagttacttatcccttttttttttttaaactagcaaacaaacaaaaacaaaaaaacaggcccggcgcagtggctcacgcctgtaatcccagcactttgggaggctgaggggggtggatcatttgaggtcaggagttcgagaccagcttggccaacatggtgagaccccatctctactaaaaatacaaaattagccgggtgtggtggcgcatgcctgtaatcccagctactcaggaggctgaggcagaggaatcactcaaacctggtaggtggaggttacagtgagctcagatcatgccactgcactccagcctgggtgacagagtgagactgtcttaaaaaaaaaagtaataaaatataaataaataagcaaataaataaataaataaatacaatggccaggtgcagtggctcatgcctgtattttcaacactttcggaagctgaggtgagaggatcagttgagcccaggagtttgagaccaagatcagcctgggcagcaaagcaggatcctgcctctacaacgtaataataataataatgagctgggcatggtggcacacacctgtagtcccatctactcaggaggctgaggtgggaggatcacttgagctcaggaggctgcagtgagcggtgattgcatcattgcactccaccctgggcaacagaataagacagtctccaaaaaaaaaaaaaaaaagaagtgtgttgaagttgatgaattttgatggagaattacagtaggaagccatcatcacaatcaagatctaaatacttccagtacccccaaaacctcgcacacttttgtttttttggagatggacgctggagtgcagtggcacgatctcagctcactgtaacctctgcctcccgggttcaagtgtttctcctgactcagcttccagagtagctgggactacaggcatgtaccaccacgcctggctaatttttatatttttagtagagacagggtttcaccatgttgggcaagatgttcttgatctcctgaccttgtgatccgtccacctcgacctcccaatgttttgggattacaggcgtgagccactgtgcctggccactcacacacttttataattgtgtctattttattttcttttagggcagaaaccaagtccttatgccccagagcgtaatatgacatagcagcctttcttactaatacacaaacagggactgtgtgtgtagagtgagcaatcacctcagattagctcaagactaaagggtgttcctaagatatatgggacttctagggctaaaactggaacagtccaagaaaaacatgagttggtccccccactaactgtggactgaagctgccaagtgctttacgtgcattaaattctcgtaactaccctatgagataggtactaatatgtttctaatggagaatcagcatgctaaaaggttaggtcacttgcctgcatttacacagttaattgatagatactggatttgaaaccaggactgtcctgctcctcatctttatggtttctgcgattatggttaaatggattattcagaaaaagaaactaccccacccacacttacctgggtttattcagagatagccatggaatttttgaattgatcacatgaatatatatatatgtatatatatgtatacacatatatatatatatttattattattgggacagagtcttactctgtcacctgggagctggactacagtggtgtgatcttggctcacttcaacctctgcctcctgggttcaagcaattcttgtgcctcagcctcccaagtagctgagattacaggcatatgccaccacacctggctagttttttttttttttttttttttttttttttttttttttttggtagagacagggttttgccatgttgcccagaaaattggtctcaatctcctgagctcaggtgatcctcctacttcagcctcccaaagtgctgggattacaggcgtgatgaatatatacatatttaaaaatagaggctgagcacggtggcttacgcctgtaatcctagcactttgggaggccgaggtgagtggataacctgaggctgggagtttgagaccagcctgaccaacgtggagaaacctcatctctactaaaaatacaaaattagccgggcatgggggcacatgcctataattccagctactcgggaagctgaggtgggagaatcacttgagcccaggaggcggaggttgcagtgagctgagatcgtgccattgcactccagcctgggcaacaagagtgaaactccatctcaaaaaataaataaaataaaataaaataaaaatagaaatgagatcttgctatgttgctcaagctggtctcaaactcctgggcttaaataatcctcccacctcagcctcccaaaatgttgggattataggcatgagtcattgcacttagcctcacttgagtatttccaaaacagactagggattgttaaggagcactgataacactcactacttttttgacttctgccatggctcaaagtaaaactttgagctttactattatatatattagagaccactttatatatatatgtgtgtgtgtatatatatatatatatatatatataatatgaccataatttatacatattagcacttattctagtttgtataaagagtgatgggatctagaggaaatctgatgctttgtacacacacatatatgccactccaaaaaaacatggctactgagaagtacagataagaaaggcctgtttcatttccaatcttttccctggaagttgctggagaaaatattaaaatcaaggtgacagctttttaagtcatgacctcacaaaaacaaactgacactcaataatgccccacaatcttccatctttctagtgtactctctgagatgaccatccatacctcactgctgctcaaaacttctttgcccctctcctaactgatgaaatatgaaagggctttttaatctccattgcctaggccaagacttcatccttctttttatccctttcttctgagtcatctctctccttttctgtttatgctattttcattagcagaatatatgttctagtccatgcattcctctccagctagtcccatttctcaactcgttctcacagccatatttttcaaaggagttgtctctacttttcacccatctacactccttgacccaccatcatctagtttctgctccaaagcacaacggaaatggtcaagctcaccactgaccttcagttttctaaattaaatattaacagatacctttatctttttttttttttttgagacagagtttcactcttgttgcttaggctggagtgcaatggtgcaatcttggctcactgcaacctctgcctccccgggttcaagtgattctcccccctcagcctcctgagtagctgggatttcatgcatgtgccgccatgcctggctaattttgtatttttagtagagacgggggtttcaccatgttggccaggctggtctcaaactcttgacctcagatgatctgcccgccttggcctcccaaagtgctgggattataggcgtgagccaccgttcccagcctgatacctttatctttattatagtcaaccttttaaattgatcactcattctagaaagtcctccttctcttggcttctgaaatgacattcttctctttgatccattgcttttcagatcttcttctgcctgatccttagatgttgagattccttagggctgggtatggtggtgcacgcctatcgtcccagctactcaggagaatgaagcaggaagatcacttgagcccaggagtttgaggctatgaactatgatcttgctgctgcattctagcctgggtgacacagcacagggagaccctgtctcagagaaaaacaacaacagaagattcctgcagtcttcctccaacatacatctaaagtgttttcattattctgcatctcttttggccattccttactccaagacaccattatttctacttaatttatcttctcatttctttattcctccttcgaatccaatattaaaacccaaatcaatgtctgagcacaatggctcatgcctataatcctaacacttcgggaggccaagacaggagagtcacttgaggccaggagtttgagactagcctgggcaacatattgagattcacccaggctggagtgcagtggtgtgatcatggctcactgcaacctctacctcccgagttcaagcaactctcctgcctcagcctccaagtagctaggaccacgggcatgtgccagcatacctggctagtttttgtatttttagtagagatgaggttttaccatgttgcccaggctggtctcgaactcccaagctcaagaaatccacctgccttgcctcccaaagtgctaggattacaggcgtgagccactgcatccagcccaaaaacattaaaaaaaattatccagctgtggtagtgtgcacctatagttctagctactcagaagctgagatgggtagatcccttgagcccaggagttcaaagttgcaatcagatatgatcttactactgcattccagcctggccaacagagcaagaccctgtctcaaaaaaaaaaaaaaaaaaaaaaaaagaaaagaaaagaaaggaaaattttaagtttcaaatttttgaaactgcatccccagaagacaccttgaaagaccttgatccagaggtacccagtaagccacacctggattcctgacccacaacacagaaatgatgagataacgtagttgttttcagcgggtaaaagaaacccaaaacaaataaggatcacatctctgcccttcaaggaaatctaaggtttcctacaggtcttagaataaaatccagactcctgattatggctggaaaggtcttattggacctagccccagcctacctttcagaccttatcttgggccgctcccttaatccagccacgttttcagtttcaggtactcagcaagatctttacaaggggctccctcatcctggaatgctccttctggctctttacttggctgactcatttcagaaacgagcttaaagttcatctctgagggtccttccctgaccaccctctctattatctgtttcactatgatgttggtttcctttataatacatcataatttgaaattattttgttttcctatttactatttcctttttgttgttgtttttttttttttgagacggagtttcgctctcgttgcccaggctggagtgcaatggcgcaatcttggctcaccgcaacctccgtctcccgggttcatgtgattctcctgcctcagcctcccgagtagctgggattacaggcatgggccaccacatccagctaattttgtatttttagtagagacggggtttctccatgttggtcaggctggtcttgggtctggggtactgttttcttttatttctttggtctcccacaggagagcgtgagcttcgtgaaattagggctcacaattcacttttatgttcctgtgttccttgtgccaggcaaactgccagacacatagtagaggtctcataatatttgttaaataagaaaaatgcatctttattattattttctaacacagtccatataactatctaaggcacacgttgagagtttcatttaactcaatctgagatgagaccagatttccctaaactatgcgtgcttccagtgaacctatttgatttcttgtctcatttattttatgaatgcatttttattggcttttgtttcccccttactagggtattctcatagcaaagagaagatacagaatttaaggtaagaataatggaatggggttgggaaaaggtgagaatcttggaagtccctactctaacatgtctgatcttttctctgagaaatcctgtcctggggctttgagatctgagtttatacttccttctttctctaggtctagttatgaagtgaaaatgtaacatgctactgtgtgtacttcctgacacctctagcttctttagttctaaagttaaggtatagaatttatcaccctaataatacaacatgcttattcatctcgatattaatggtttttccactgaactgaaacatcaacggattgagctcctattatatccagggtctgggctgcacttaggcgttacagaagtgagcaagaaacccagtatctgttctcagcatttctgtaaacagcccaggcattttcaactttagtttcctattagaatcacccaggcactgaagtgtactaatgcagggccaaccccagagcaactgaatcagaatctctggggatgaagcctaagcatagaaattgttctaaaagctctccaggtgattctagtgaacagtcagggctgagaactgctagtctgttatagactcctgtcttgaccttcgttcctgattatacacacccacacatccatttcaaataggtatggcttacataacttactagattttagacttttagtgatgtttggcacatgaatggaatacaatatatttggattacaaaaatgattctgggctaggtgctgtggcttacgcctataagcccagcactttgggaggctgaggtgggaggatcacatgagcccaggagttcaagaccagcctgggcaacatgatgagacctcttctctacaaaaaaatggaaacattaggtggaaggattgctggagcacaggagatgaaggctgcaatgagccatgattgtgccactgcattcccacctgggtgacagagaaagacccagcatcaaacaaaacaaaacaaaaacctctgtccattgaatgctatctaaagcattaataattttttttttttttttttgagacggagtctggctctgtcacccaggctggagtgcagtggcacaacctcggctcactataacctctgcttctcgggttcaagcgattctctgcattagcctcccaagtagctgggattacaggtgcatgccaccacgctggctaattttttgtatgtttagtagagacggggtttcactatgttggccaggctggtctcgaactcctgacctcgtgatctgccaggctcagcctcccaaagtgctgggattacaggcgtgagccacggcgcccggcccattttttgaaaatctaaatgtgtacataattgcagacatcttgatacttcacctaaacttcagcctgcacctccgagaaataaaaatattctcttagctatcacaatgctgttgttatacctaagaaaattaaaattaatggacattttctcaattgtttccccatagtattttattgctatttcttggcttttccacttgttcagcatctgatcaaagatcatgcactatatttagttgctgtctctttgggaaagcctattctcttaactctattccgtgttacctgggaaatgcttaactcaaccgcaacactttatttccacagcctcatctctttggccaacctccctccctcaggattggcaaatgcagtagcagagggaattcgctcagaagaaaacatctataccattgaagagaacgtatatgaagtggaggagcccaatgagtattattgctatgtcagcagcaggcagcaaccctcacaacctttgggttgtcgctttgcaatgccatagatccaaccaccttatttttgagcttggtgttttgtctttttcagaaactatgagctgtgtcacctgactggttttggaggttctgtccactgctatggagcagagttttcccattttcagaagataatgactcacatgggaattgaactgggacctgcactgaacttaaacaggcatgtcattgcctctgtatttaagccaacagagttacccaacccagagactgttaatcatggatgttagagctcaaacgggcttttatatacactaggaattcttgacgtggggtctctggagctccaggaaattcgggcacatcatatgtccatgaaacttcagataaactagggaaaactgggtgctgaggtgaaagcataacttttttggcacagaaagtctaaaggggccactgattttcaaagagatctgtgatccctttttgttttttgtttttgagatggagtcttgctctgttgcccaggctggagtgcaatggcacaatctcggctcactgcaagctccgcctcctgggttcaagcgattctcctgcctcagcctcctgagtggctgggattacaggcatgcaccaccatgcccagctaatttgttgtatttttagtagagacagggtttcaccatgttggccagtgtggtctcaaactcctgacctcatgatttgcctgcctcggcctcccaaagcactgggattacaggcgtgagccaccacatccagccagtgatccttaaaagattaagagatgactggaccaggtctaccttgatcttgaagattcccttggaatgttgagatttaggcttatttgagcactgcctgcccaactgtcagtgccagtgcatagcccttcttttgtctcccttatgaagactgccctgcagggctgagatgtggcaggagctcccagggaaaaacgaagtgcatttgattggtgtgtattggccaagttttgcttgttgtgtgcttgaaagaaaatatctctgaccaacttctgtattcgtggaccaaactgaagctatatttttcacagaagaagaagcagtgacggggacacaaattctgttgcctggtggaaagaaggcaaaggccttcagcaatctatattaccagcgctggatcctttgacagagagtggtccctaaacttaaatttcaagacggtataggcttgatctgtcttgcttattgttgccccctgcgcctagcacaattctgacacacaattggaacttactaaaaatttttttttactgtt

SEQ ID NO: 12 - DNA, 26025 bp, Homo sapiens
gggggcgggtgcctggagcacggcgctggggccgcccgcagcgctcactcgctcgcactcagtcgcgggaggcttccccgcgccggccgcgtcccgcccgctccccggcaccagaagttcctctgcgcgtccgacggcgacatgggcgtccccacggccctggaggccggcagctggcgctggggatccctgctcttcgctctcttcctggctgcgtccctaggtaaggtcgggggaggcggggcgctgggaaaaagctgggagaagacagcagactggagtgggaactgtgggatgggggcgtcctgggggccctctcagcctgtgtgaccgtgcaccccactccacccaccgcccagaggctgctgggacccctaggcagggtgcagtggcaactgtgccaagtgccccagctaggcatcgggcacatctgcatgctctgacagctgcccaagtggcaggcagggctgtcccctgagggctgcctgtccagcccttccctgcccagagaacccagggcacaggtagcttctgcaaagaaggagaggcacagggtgggggcggtcagtgtgttctggtggatatcactggcttttgacagctggcatctttctgcccctctagtctcagggctctagtgttgcagaggacacagagggcgtggtatgctcagccagtgccccatgccctggtgaaacccctggctgagccttggtgggcactgggcactggtcacggtgggtccactttcagacacagaggcagcactgcccacctggtccctattctaagggtctgatggcccaggaataagtggtcagctgattcctgccatcctagcaaggctgccactcagggaccagtgtggagtactggggaggatgtgggacactcttcagctcagctatgagccccttctgggtccctggataaattacggcatctctctggcctcagtttcctcagctcaaacacagaagcccacacagggaagcaccattttccccttccaaagtccagactgtcagcatgttcagatagtatcctggccccaacacaggggctcccgggctgggggcagaggccctggtacccatggcctggttgcctagttcttgcctgcccagagctgaagaggctggatctcttcaaagagcctgtggaaccaaactttatagggagggcccagggaaagtatgagtcatgcagggactcggagggaggcaggagggaggtggagggcttggcacagggacccagtgggcaggatggaatagaaggagagggtgataggataagagggagaggaggaggctgaacctggaagataccttagcaacctgggtgcccacaggcagctggctatctcagcacttggaggctggcctgggcctctgaggaggaggagggctccacatgtcacagacacagctgccctaagccccagggtggatgcttctcaaggtgacagtcagagggaggaggagaatgggaggtggaatggacagtctcagcaccaaggccatggctcatggcagggcatggcttccagaaggaacagaggatggtggcaggcaggcaagccagcatcccacctgtcatgggccacctgccctgcactgccctccctggtggccctgtgagacccttcctgctttcttgcccacttcctgccctcacttggctgggctgccctctgttcagcagccccaatttgagaaacatttctagagatccagggcacagggacccagcttgcagagcacccagtagcagagaggccccaagaggagctcaggacgccttcccctatattgcttatatggccaggggcctttactcccagaggtcttggctactcaaacaacatggtatactaaagggtcatctcttcctgggcccagcacagggagatgatttaggctggctgcagctttccactgaaaggagccagaagcatttgaattgctctgggacctcaggattctgaactgtgacatggacacactataatagatattcacccaactccctaggacagtgtgcactgagggagatagcagatgggaggcctggttgcaggcatggtcagcaggatctgtaagttgagaagattgatcaccagcctgccgaggtgctgggttgccctgggtatgttgcccaaggtcaaagcctttatgccagggaaagtgagatagagtggccggggccagcctgttctccagctcttggggttgggccagcactgaggagaatggtagtgatgaatgtggtgttcagaagcccaggaaacaccaaagatacccctttcctgggcctgactcagggtgagatgggtggagaggtacacttagggaccaggacccagcagatctcaagggtagcagagcctcttcttccccacagacattcccaggacccgaggcagttactgtccttgccctgtcctcacaggctgactcaggactcccaacctctgggactagcacatttaagtgcactggggctagggacgagagaccccatcttctccttcatagcaaaccaggctgcagggccttgttgagtaacccagtgctgcaagcctctgacgcagcaatggtcagctcttaggaaatccacaacccactgcccagaggctctggagtagagaggaacagccttgaggccagtccctggcatgaggggtcatctacccaatgccagggacacccaagggccagcaatactgggagtcccttgctgagctgtactagttgttcatgcttccacccaagcagggcaaaggttccgctggggtctgaccttcctgggagagggtggtccaggcaggagtgtgctgctgagacgctaaaggggtcacctccctatccgcacacagtgtatggggtgttaggcctgagcagatgaaaggaagaaagggatcctcaaggagaacccgttggcagtgagcgagccccacataccaaacttgaggccccaggctttagccaaccaatgacccagggtcagtctggtctcccaggggagggtgggccagggatcagcactgtggcttccagtggccccacagatgcccttagctgcagtcccagcatgcctgtatatggcaaagccagggacatgcatgccagggcttccgtacagccccttgcttaactcttgggctttgtgagtcactcagacctaggcttaaatcccaagatggccatttactgctctgtgatattggacaagttattcagtctccctgagcaagttcccctccctctaaagtgggaagatgataccacctcccttggagggcaactgtgaagagccaatgaacgaacacttaacacagcacccggctcctcgtgaatactgtgtaatattatggtatttcttggcttctgcaggccacatgccattggctttctatctaagctgcttgctctctacagggcctaatggagtgcccagggcctgggaaggcattggtgagcttcactgggactagattctccaaagcctggagtatgaagggtgcatgggctgcgtccagctacctgtgagcccctgtaggccctcacagtctgaaatgcccatggaggtgcctacaggttctcttcttaaagttgtcaggagatggggacattgcaacttgaaggcaagcctggccctgggtttgcttatcttggtggatctttcttacatctgatctttttacattcggtccattcactttggctggccatcaccaaagacaaagacagtggccaccatctttctcatcagtaatccaataatgaggttgctctgctacttaccaagccaagcaagcccattcctttagcctttctgcgtaggatcttatttcccatggggacctggggtcaaaccctgcctctgctgttcactcatcatgggaacacaaacacacacttcccctttgtctgtgcaatggacaggttgggtgacgtggtctcagtgaggctgaccaccctcctctgaaggttaattccatgatggtgtttccctagcttcagtcatttgcttatcacctttgtgatctctgcagtgtctgcctttcataatatttacttatttttttctttaaatctactcattcttttatttgagtatgtagatctttaaaaggaaactttttatcgctgtcattagtggaaagccagtatcacttgtcataaatagaacaaaaccataaaagaacgtaacaggaaaaccatataagggtattgaattctagttggaaactttagcctgggaaggctcggagtctgaaaactgctgctttcccttgcaaaaaattaaaataaaataaaatttaaaaagaaaaggagattagcaaatgttttagagacatattagcatcaaactgagactttctctttgatgtaatcaggactgaaataattgtaaagggaataacctcttctatatatgattcaatgttatttaatgtaaaaccaaaagtaaaactatgtggtagacgtggccaggcaagctgggctttcattggtcatgacatttgtccgtcttcaagaaggaggtggggcctccagtcagtccccagctacctctattctctagagagtagtcagatggcaccagacctccagaggctgactacctgggttcagatcctgacaccatcacttattagttgtgaggctgtgggcaagatactaatctctctgtgcttccgttttctcatctgtaaaatggagatgatactagtacctacctcatagggtggaaggattacataaactaatctatgtaaaagtgtttagaatgaggccgagcacagtggctcatgcctgtaatcccagcactttgggaggctgaggtgggaggatctcttgaagccaggagtttcaagccaggggaccagcctggacaacataacgagaccccatcactatgaaaaatttaaaaattagctgggcatagtggcatgtgtctgtagtcctagttgggaggcaggggtgggaggataacttgagcccatgagttcgaggttacagtgggctatgatctcattgtcactgcattccagcctgagtgaagagcaagaccctagctcactaaagaaaaccaaccaaacggccaggcacagtggctcactcctgtaatcccagcacttggggaggacgaggcgggtggatcacatgaggtcaggagttcaagaccagcctggccaacgtggtgaaaccccgtctctactaaaaatacaaaaattagccaggcgtggtggcgggtgcctgtagtcccagctactcgggaggctgaggcaggagagttgcttcaacctgggaggcggaggttgcagtgagctgagattgcaccactgaactccagcctgggcaacagagcgagactccatctcaaacaacaacaacaacaacaacagcaacaaagccaaccaaacaaacaagcacttagaatgatgcctggcacagagtagtagggggcaaaaagacttgagctggaccctgaggacgtcttcacagcatagaagcgtgagggtggctggctggagccgggagcctgagctgcacacagtcctcctccaaaagggcctggggagtctgggaggggttcatccacagaagcatccacgggccgggacctctggccagctgcctaggccctccctggggaggcatgctagcctccagctccagccccggatgcacggaggctttcccaaggtgctggaagtgccgcttccttcaatagagcctggcttccccttcccagcccccttggtctgatgtgaatggacacttcctgcgggggcaggtatcaataaacacatctgagatgccctttgtcctcactggccagaaagccccagggcagacttgctggcttcaggccctgagcctatgccttgtgacgcttcctttcttagccttggcagccccagtcctgattgatccatgcctctgtttccctctgcatcttgataaagacagaacatagtcttttcctacagccccagccccagcctgtggaccatcctgggggatggggcctggcggggagctggaaccaggtcccattctctttgggatgtcctgtgagaccaaggacgggaccttttgcatctagtgcagggccagccacagcaggcaattaataactgtttacttgacaacctctagcagctggtcagagttcagctgtttgggtggggcttcctaggcccgactaaccaagcttgggtcccacctccaaaggctagggcgttgccttggcgactgtgggctaagctcacgccctgtcatgaaaaatacacaggcctgtccacacccacacacacccatcccgtgcacactcacaggggtcacccggggcctgctgggtggagagaggtgaaggtcacaaaaactggcattctgagaagatgccaacaagagctcctttcccttgtactgggacagaaacatctgagggtgccacagctagaaatctcaggcacaggtccaggcccaagttctgagcagatgcccctgatggaactctgcatccccacagcctccctgcctgggcctggcccatgttaggaccttggtaaatatttgtggaatgaaagaatgatgttttcagcttgggtctgaggcagagcaggaatgttgcacggagggcgtggaggtcaatgcacggtcagttcattttttctaaatagctgaaggatgaggcatcagccccgcctgcccactggagggttctggagaggtgggtggctcttcctgtctgcagtgctggcctgtccaaggtgtgaatctcagctcagtcacacagcactgtgtggccttgggcaagtcacttctctgagtctgtttcctcatctttaaaatagggatgataccacccatgttgggggtgttatgagaactaaatgtgacaggtataagatgctcagcaagagcctagcacataatacatggtcataagacagctcttccctcctgcccacaggattttagagctggcagccctcaggttaagatgaagaaacggaggctcagagaagggtgggatctgcccaagggcacacaatgagggcacaactaagtggacactgaggccccaggacgttgcaatccaagcgagagttttactcctgagactcaggctttcccaggttcacggcactcttcctctaggtggccctgcctccttacctggtggcaggtggcgggtggcgggcggggggcctgggtcttgacagcagcacggcaactggacggttcccgcctggcacatgctcaggcccaggccccgggtcattttcctgtcccacatgcttttggccaccctggagccaggggctttcctccccacccacttttcccggtctccgacaatgacccaggtgtccaaaaggatctgctcctgacaataagcaacatcctctcgccaaagaattgtaattttagccgggctgcacagcttccctgacaacacacaggcatgtgcacagatgtggagtccgcggggcacgtgcaggcccctctgcgtgctgtgcgctgcccctctcccccatgccatgccttcgagtgtcctcctaacgacaggctgctgtgggccttgtcccagctggagtctcagacacagtaaatggggtgttttctggccttccctccctccccaggacaaacccctgtggacccttggtttgtcctgtccctctggcttgtcctggaccctctcctgtctggccctcttgcttgaaaactgaacatcctcccctgctccccaaacttgaatcctaagacagcttttttctaaaaggggaacaactcctttgggacctgtgggatgggtggccagtgtgtgaggggtggggaggtgtgggggattgagcaatgccccctctcccgtactccctgaactctgctttctctctgatgcacccacccgccgtgcatctcaaggaagttgcctccaggggagaacatcccttccctactgctgcgggtgctatgggtacaatcctggggtcattaaccccattgcttagaccctgagggctcccagcctggtgccctgccccaccttgttcacagggacactcaggccaacaaccacgctagccccacttgtccacacctctgtccacttgagggcccccaaccccacccagctcagctttgcgcatcttgctttggctgccagctctactctgcctgccctgccataccctcctctggcctgcagccccgtgtctgctgagccagccctttggccagcccccaaggtatgtgtgctggtggtaaatactaccgtagctgaagctggagctgaattcagctcccagccctggggtggctctggggtaggaggtgatgtcaggcaaagggagaaaggggcagaagctgggagaggtgctggtgggacctgccacatggcctgctggggaagggggcagcacagggcccccttggggcaggttttgtttcttcctgggagtacgtgggagagccctttccctaggtcctcctcacttctgtttcccggcagagccatagttttgcagctacacccaccccactcaggtgtgaaggggaagtccaggccagcacggacaaaaccaggggcacagccaagcttcctggggctccttttccactgagcctgctgcaggggtaagggcagtgggttagcagaggagagttggctagtccctgcactgccaggctttccctggggaccctgggtggatcatctcctctcttgagtctgtgggtcagatttgtagcataatgggtttgggcagtagagtcccatgccagctagcccaagaagccacactcattcatcacaaactcaaatgtccacaggaccaagaaaccacggtgagagagtgaagcaggccaggtggaattattagggagtagtacggacggactctggcgaactggagtgccggtgccccccaaaagctgctactgagccccagctgacagttgccctgtgggaaagctggtttagcattatcttctgattttctaaggagagctggaagtcagaattttcatgtcaaattcctggtttttaaatgttgccatctcaagaaaattaaaaagattttgaggatccaatgaaatatgtgtgaaggctggatgtggcctgtgggctcccagtttctggccttttttttcatcagtatagtgtctatgtgtctgagtttaattctagctctagcacttgcttgctgtgtgatcatcagtgagttacgtaagttctctgtgccttagtttcttcatcagtgcaatgggaataaaaacaataccttatggcattgttagatatgcccatgaaacccttagcgtagtgcacaacacatgctgtgtcttcttattacggttctgcctagatcctgcgttacctgaagtcccccatgctccaggctttgagatcataccctctggaactttggaacttcagtccaaccactttccctttctgggtctctgtgtttctgcctgaaaaggagacctgtatcttgccaaagaagttctgaaatctctgctcaccctgacaatgactccaaaaatctggggctcccagacttggctctctgcctaaaactccactcttgcagacatgccgtttggggctttggtgcctttggagactctcctttaaacacaagcgccccaggatcggatcacaagttgttatcagtcattcacaccttagcaggaaagactttaaagctggcttctccatcccactgtgcttctcactcctaggaggcacttcttgacttgctgaatgaattagagacctgtctagctcccaagtaccaagcgccgactactcgcatggcacttacagaacacttcatgtgaattattactaaccgttgcctcaactctgccagggagatgttttcatttctgggaaaaacatctgtgagtgaggagtcggggctcagcgtctaagtggctcacagctactggtccagtacaggctggccagctccagaagccccaccaggctgcctccctcctggctgggcaaggctttcagctcttccagtgggtcccagcctgccgccgagggtcctgggctctaagggcagggaaggggcatctgaaggaggatgtggcattatattggttctgggcaatgcccctggctggggcaatgaaaaggatgtatcagtttggattctgtacatagttctaaccctccttccctctctgctagacccacaacagcctgacatgccatttaaaataaaaataccactggccgggcgtagtgggtcacacttgtaatcccaagactttgagaggccaaggcaggagaattgcttgaagccaggagttcaaggtcagcctgggcaacagagggagactccgtctcaaaaacaaataaataaataaaaataacaccaacgcataataattatagctatccctcagatgtctgcagagggcattagagctcacatcttgtgttctcatctttccctcatctagtccttttgcaaccctgcattgtagccaatagttttctcactgcacagaggaggaaactgaggctcatacagttagatagaaacgcggcctctatccaatattctgttttcaaaagctcatggttttgagggtcaacccaattaaatgctggaggattgggataaggcaaagtggaccagggaattgcttcatttgcttggtgaaaaaaaccaaacagaactagacagttttctaagtttggctggaaggacgtgcatggatgagatgacctttcatatactctctgtcccggtccctcagacactgggttttcccattttcacactatcttgcctaggacaccctttctactggctgaaatcctatctatgcaccaagtccaaagactctccctccttcaggaagtccctgactgtccccagaaggctgtttcctccctcctccaagtgccctgagggctggcattggattgcctttgccatggggttctgctgtcgggaatgcaggcctcgtctgctcaaggggaggccatgcattcagcatgcaggtgagatgcagcacctggcccaggccttgcacacgcaggtgctctcttagtgctccctggcaaggatgggaaggcatgttcagtcctaggagtaggaaggggcagaggtgttgatggcccctacagagcggccaaggacaaggagctgctgttcgaaacagccttcctgctccccaacctgcctcccacccaacaggttttgcatatactctactgggaagagggacacacccgactgcatcactgccctccaagtctctccctgccctgtccagcatccaggagcacccctagttggggaagcttctgtgactccccctacaacagcctaggatggagtggggtttgtgaacaaatgcagaaggcagtcttagggaggtcagctgacatgcccctggcctgtggctgggaagtagcagaggctaaggttcttccccgctctggggttgccaggagtagcactggatcagtcaggtgacagggctctcctctctctgagcaggtccggtggcagccttcaaggtcgccacgccgtattccctgtatgtctgtcccgaggggcagaacgtcaccctcacctgcaggctcttgggccctgtggacaaagggcacgatgtgaccttctacaagacgtggtaccgcagctcgaggggcgaggtgcagacctgctcagagcgccggcccatccgcaacctcacgttccaggaccttcacctgcaccatggaggccaccaggctgccaacaccagccacgacctggctcagcgccacgggctggagtcggcctccgaccaccatggcaacttctccatcaccatgcgcaacctgaccctgctggatagcggcctctactgctgcctggtggtggagatcaggcaccaccactcggagcacagggtccatggtgccatggagctgcaggtgcagacaggtgagggcatcctgcacgtgacagcctggcgtgtgtggagggctgcctgtctgatggtgtgaccattcatgacactgtgctgggcagagtgtgaggctgcatgggtaacactggcactccagggagtgtgtgggtgagatggggtggtcaagggtgtgtggagtgtgggtttgtagttagctggagtgatggagagggagggtgtacctggctccatttgtgacagtgagactttttaatgtgtgaggctgtaggtacctgggctgggagtgtgactgctcatgatgacatcatggctgctgtgggtataggcatcagtgggactgattggtgccctggggcatgactcagtggatggctgaatggctgttggagaatatatgcgtgtgtgtgtctgtctgttcaggtgagagtgcaagggcccatggttcggatagaggtgtgggcaccagcgggtattcacatgcccctgggagtggcatgaaaatgggcagggtgagaacatgccagggtgtgtgtgggtgcacacgtgtgcaggctgccactgggccaacactgccgagtaggcactagcgtgagaacctggggcaggagggggacactggcctggacaagcctccctggcctcctgggcctgacacccacctaatggcccttctgtttgttcccacaggcaaagatgcaccatccaactgtgtggtgtacccatcctcctcccaggatagtgaaagtaagggaccaacctcttgccccttttgggttctctgttttcttctgtcctcatcctgcacccagaccctgtttggaactctggcctcatcaccccaagccctcagaaccccccggtcctcctccttttctgctgctgcacatcccttctgcttcctccttggtgcaatccccagaagcccactctccttccatctgctctggagtctctgctcctcttgactctctggagtggctgtgccttggcagtgacctttggccagggcaagtgcctcatgacaggtactgggtgccccaggcagctaagtgccgccctgcccaccagccccctatggcttgggaaggctgggggtcctcttggcctagaattaaactacttcagatttctgtgttctgtgtttctatgttcttcagatgttctctgttgcaggggagggaggaggaagaggttcaggaaggggaacagaactacctttcctgagttcccactgtgctgggcactggactaagtctttttaagtattattatctcagggatatatatatatatatatgtgtgtgtatatacatatatatacacatatatacatacatatatatgtatatacatatatatacatacatatatatgtatatacatatatatacacatatatacacacatatatatgtatatacatatatatacacacatatatatgtatatacatatatatacacacatatatatgtatatacatatatatacacacatatatgtatgtatgtgtgtgtgtatatgtgtgtgtatatatatgtgtgtgtgtatatatatgtgtgtgtgtatatatgtgtgtgtgtgtatatatgtgtgtgtgtatatatatgtatgtgtgtgtgtatatatatgtgtgtgtgtatatatatgtgtgtgtatatatatgtgtgtgtgtatatatgtgtgtgtgtatatatgtgtgtgtgtatatatgtgtgtgtgtatatgtgtgtgtgtgtatatatatgtgtgtgtgtgtgtatatgtgtgtgtgtgtgtgtgtgtgtgtgtatattttctgaaacacggtttcactctgttacccaggctggagtgcagtggcgcgatctgggctcactgcaacctccgcctcccggattcaagcgattcttctgcctcagcctcccgagtagctaggatgagattacaggcgtgcaccacaatgcctggctaatttttgtatttttagtggagctggggtttcaccatgttggccaggctggtctcaaactactgacaaatgatctaactgcctcggcctcccaaagtgctgggattacaggtgtgagtcaccacgcctggcctcaggaattttttttttttttgagaaagactctctctctgtcactcaggctggaatgcagtggtgcaatcacagctcactgaagcctcaaacttccagatgcaagtgatcttcctgcttcattctcccaagtagctgggactacaggcacgcatcaccatgtctggtgaatttttaaaaattatttttggggttaggtgcggtggctcacgcctgtaatcccagcactttaggaggtcaaggcaggcagatcgcttgaggccaggagttcgagaccagcctggccaacagggtgaaaccccatctctactaaaaacacaaaaattagccaggcatggtggtgcacgcctgtagtcccagctactcaagaggctgaggcaagagaatcgcttgaacccgggagtcagaggttacagtgagccgagatcgcgccactgcactccagcctgctgatagagcaagactccatctcaaaaaaaaaacaacccaaaatttgcctggcatggtggcaggcatctgtaatcccagctactcgggaggctgagacatgagagctgcttgaacctgggaggcagaagttgcagtgagccgagatcacaccactgcactccagcctgggtgacagagcgagactctgtcccaaaaaatcaaaaaaatcacttttggtagagatgcactctcgctatgttgcccaggctggtcttgaactcctgggctcaattgatcttcccaccttgacctccaaagtgctgggattacaggtgtgagccaccatgcctagcctcagggaattcttataagaactctatgaagtaggcatcaccatcttctctgtatccatggaaagagaggcctagagatgtatgctaacttgcccaagctcacatagcccagggtagcatagctgggatctggctgcaggcctgcttagctctgcatactcaccttcttcccagcttggggcagtgcagtgggtagcagttagccccccggtgcttgccagagaggtgccctacagggtaagagggcactgccctaagggtgcctggcgctgagaggttgggtgagaatacccagcagcttggagacaaaatgcaagggcacctccctcttctgagaagaggtcttggcttccacacccctctataccctgtatgtgtcagacatccagtggggaccagcccctgctaggccctggagatacaaaggcatccaggaggacatgcacgaggacctaagccggaatggggatcagctaaaccacggacccaacaaaacccaactcaaaggctacagtgactttttactcagctacccttttttcaaaccaacaaacaggccaagagcaaaattagaacatgcattttggtcagagccatgttggtcaggctggtctcgaactcctgggctcaagtgatctacccgccttggctccccaaagtgctgggattacaggattgagccactatgcccagccccagtgccagcctcttaatgttatccttgggaagtaagagtgtagcttgactatgaaataacatgaaagtacaagttaacctgaggtaggggaatgagactagagaagttggtgcccaaggagctcctgcattgctgaggggctgtggtttctcagtgagctcagagaaggggtctaggcagctcatctccctttgaacttcttcccaccccccagcgcagcagaatgtgctgtctgctttcacccagcttcctccctgggaaaccaggcagcccaaccctcagcagccgaactccctcctccatatatccccgtgggctaccaggcaggccctggacaaaggccgcctgagcaggccaggcccctcccatcccaccctgctgtgtcagggcctggcacactccttagtgcggtgtcggcagctacctctgccagcgcctgatcaccttcccaggataagcctggctctggatggtgagtgagtatgcctgccttcccctgtgagtgccagcccaggcactggccacgcttgggggaaggggtggggaactgtggcgaggctgagctctgcagagatgcctacggcttcagaaagcagctggatccacagacttgtccccaaacctctgcgcccctctgccccagcctcaactcagcccagatcgtaaggaagcctcaggctctcaaagtgaaattaagtcctgatctgatagagggtccacataggggaaatctctacctggggatagaagttaggcagggatatctggccaagctcaccctccaaaggcagatagggaacaggtatcaatgagcacctggcaaagctcacaaaatgttgcttactagccgtccagaggagacctgctttgatcactagaagagagtgctttgcaactggcttctcaaatattgcccacaataaggtcctttgatgggggttttgaaatactgaggtgtctgggttatagaatgtctttactttcaatattccacgtcaaaatgcagccttgctaagatctgcagggaacctgctgtaatgtggagcggaacttgctttgtaattagcatagcaactgttcctgtaccagtgggtacttctaaagtgactgaaaacagtttgttctcatttgcagtatgaacaaacctcctgaaagcttgtttacgctgtcggattgtagagcaaaacaaaaacagcctttattcccaaacaaatagcggaaaggcaacatttagaccacagccatttacctctcagagctctttggggcgaagttgacactgtgacaaggtatcccagcccatcttttggccctgggaaaggctaaaattgggaaggaaatgcgtttatgttggttgtggttctgagggcacgtctgttcccagctaaactcctgcagtcagcagatgccctgaaataaatcaaacctcctcatgctgttgggacagcgaagcttcgtgtacacctttttggagggcaatttagcaatagcctaaaagaaaatgcacatactctttggctcagcactttgaccgctaggaatttactacagatttccttgctgagtgagccaggctgcgtgcacaagttcattgctacattattagttatgctgaaaatggaaacaacatgtctaccaacaggggactgcttcaataaatttagtgggagccatgtgataaaactctaagcagaatgaggcaggggagacagagagatgtccaagctgtgctcagtgggaaaagcattgtcatatgatgctgcgtctgctgtatttgcagggaatataactaggaccataacacaaaaaccggcacacagggatgatctcttcagagggggtcttggtacaaggggaggaggagattcgaatattttttaaacttgtactttttttggtagtttaataagtttaaaattgaaaaacattgtacaaggattcacgtttttctagttctcaccccgggtgtttctcctgtgacttgtgtggtgagatcaaggggttctagaggccccatcccagagctaaggagtctctgggatgagttggggctttttatctattatgataaaacatatataatgtaaaatttgccatttcaaccattttaagcctacagtttggtggcattaattacattcacaatgtgcaaccgtcaccactgtctattttcaaaactttcatcacttaggcttcttttgaccttgagctctgtggcatggggtctgcgaaggccctgctctcccttttcagagaacaacctgtagccaagggtgttccagctgtaccttgtgggctgggatgaggactctgttccctctcttgcctggagctgcctgagctgtaggtgacaggtcttgtttctgagtgctccaggggcatagggcggcaggcacagggctctctttgaaaggagaaccgccttatcttccatgcctctgtaggttgctgggggtctagctgtgggactctggggaaaggcgggtctcctgcttcctggccttccctctctgagcctcagtttatgctcaggaggagcaatgggaatggggcttcaccttggctacctctctgccctttcagacatcacggctgcagccctggctacgggtgcctgcatcgtaggaatcctctgcctccccctcatcctgctcctggtctacaagcaaaggcaggcagcctccaaccgccgtgagtattcctccctgcctggggtgggtggacggtgcgagtgacctgctccagcccccagttcagcccctgggattcgcaaaggcacgatgcaggcacaattccttttcatttgagagttgggagcagctgcacttcccgccaggagctgggcgaaatggccgagagaaaggaggcatgccatttccgggggccaagtgcccaccagcccctttggctcccaggcagtgctggctcggcactcaatacatgtcttctgaatgaatgatcatatgcagtagctcaagttgctttataaaagcaagttgctgccactcagagatccttgggggacctgtttaaggtatgggcgtgcttgttttgtaattagtagcaattgttgggacaaaaaatgatctttggaatatcagaagtggaaggggtcttacagacaacttagctcaaccctttctttttccagatgagaaggctaagatcagtggggttacataactgactgaatgttacgtaacttagtaagtggcagagctaggactcaatctcagagctttcaacgcatgctctttccagggaatagaagtccaccatataataaaaatgctctcacttactcctcattgcaagtccaagaatttggtcctaccattgtccccattttactgatgggcaaacggaggcacagaggggttaagtaacttgcctaaggaaccacacagcaaataagtggtggggctgggctttaagtcatgggcacaaacatctttcacctcccaccctggccaggtgacagtgccccttgcctagttcctgaccctgcccttgagtcttggttagtctgagtcctccaagaaggggctagggagttttttacccttgcctcccctccctggcctcttcccgtctgcctggctacagaggtaactgagaaaggattgctctggtgccaggtggcttttggctcgcaacttatttcctgtggccggcccttaacaacttgtcatccctccctcccctcattcccgggggcccccacgtgaagccccatagtgggtcactcgggggctgtggccacctcacccttgctttcagaactcccctattcctctcctagaacacaccacaacctacctgcaggaatacccatggctgggggtgggtgggggcaggtaaagggcttggaacagaagagcaacgctgggcagcagggcagggggagcaggtgttgctgtgccctccctggtggaaggctggcccagagagcctgctcaggaatgaggcactctcaggaaaaaaagaaaaggaaagggctgggagccttgaggacggcagtttgctggagaggccaacaggtgtggatttccatcctgctttggactgagcctcagtttccccagctctaaaatgggaccaacaaccctcaccccaaagggtggcacagaggatgagatgagggaatacccgtgtgcacctgcacgaagcctgacccatgagtcggctgtaagcaatagccatggtttgaatagatttcaggaacttttgggtaacttccctgtgtttgttctgttgttgtgcccctcccccaccatctgtttccccatcgtaatcagcagtaaatctccttaaaacgagaagcatctgtgggaggacatggggtgctgcatgaaagagggaagttggggtcactgcatctaattggtggccagtttggggggtggggtgtcccaaggctgaggcaagcggcagcaacttggatgagaagcagaaagtgagtgaagtggctgggaagtgatcggggacttgcaccttgtaaggtttccctgagagatgtcccctagaatgccaccctattaggcaatgtaggggataggacagagaggaccaggagccctctaattaggaactgaccttaaacactcccacccagtaagtcatggctaaagaccagaacctggcaaatgttcaaacaagagacaccagttagcaaattcaagagttgacctttgctcgatacttaaatcctgaaggtctgacactgtgtaagtcaagccataggagaaagcgctggctgcctttggtctcctgatggcagatagcgttcttacactcctggaaaatgcagatagagtttcatttatcagtcgtcaaaatgggcccctcatggaggccccatctgctggacagacacgcagatcgcttgctggacagcacccatgtgaaaagaaatggagtccggagctgtgcagggccctcctgggctcgctcctgttccctgcagggcatctgccagcaggggcagggatgttgtatggggaagccttcccttccatgaccagcttctctgtctgtctgtccctaggtgcccaggagctggtgcggatggacaggtaaggcccatggagaccttcttgagaaaacttcctgggccggctatccaggaagagatacttctgtgcagtaggggccctgtttagctgcctagagcagctggtcagaagagcctctgccatctgctgctgaagcctgcacatctgtgcagattggctgttctcctgccaccccgactcagcaggctgagctctgattctgctcagatgtgtcatgcacccaccttcgggtctcagtggtcagcctgggccaggatggggacagggaggaagcactgtctggggcagacagtgagacatgcaaaggaggccagcgggcccagccccagccacagcccttgagctgtgcctcctgcccgcagagaactccaaggagaaagctgttaggccgctgcaggccacaagggcagaggctgaggggtcccagagtggtgcagtgggctgggtctaggggcagaggggatggggactgtgtattggtgtgctctgggcaggaagctgccatgcagcctggcctggagggtgtgttcagggaacccaagttcctgccccggtacctgcaacaccaaacacaaagctcctctaggtgtttgaaagggatgatcttcaagacaggttgaaggaagtcctgcttgcaactcatctagaatctaagagttgcaggggtcttcagaagttatcccactcccaactgggaagagaagagaacccctcccctcagctcaagacaggctttggggatgttcgatcctaatgccatcaactctattgaccaaagagaaacttgtccccaaattcctgaggctgaagttctagaagtgtctgtgatttttggcttcctggctgtgcccggggttgatggtcagaccacagggaggagctggggtctgttctggtgggccctgatgccctcagctcaggacaggtgggcaggtgcagcccatggcctttgctctgtgggcctggctcctgccttcttgcttggagatgctgctgaggcttggggatggggatgtaggtgagagaaagggaggagagaaaaactgggggcagggagggcagagttcacgctccggacagcacagatgaccttccattctggttctgtggcagcaacattcaagggattgaaaaccccggctttgaagcctcaccacctgcccaggggatacccgaggccaaagtcaggcaccccctgtcctatgtggcccagcggcagccttctgagtctgggcggcatctgctttcggagcccagcacccccctgtctcctccaggccccggagacgtcttcttcccatccctgggtaagtgtttcctgaccttcacagcacgatgacctgtaaggtcatgacctcatggcctgcagggcatcggcctcactccctgccctccctgaagagttccacggcctcacggggtggggttgagggtgagggacagaggggcccccattcacctccctgaagagttccacggcctcacggggtggggttgagggtgagggacagaggggcccccattcacctccctgaagagttccacggcctcacggggtggggttgagggtgagggacagaggggcccccattcacctccctgaagagttccacggcctcacggggtggggttgagggtgaggggcagaggggccccgttcactttgcttctccttttcttgcagaccctgtccctgactctccaaactttgaggtcatctagcccagctgggggacagtgggctgttgtggctgggtctggggcaggtgcatttgagccagggctggctctgtgagtggcctccttggcctcggccctggttccctccctcctgctctgggctcagatactgtgacatcccagaagcccagcccctcaacccctctggatgctacatggggatgctggacggctcagcccctgttccaaggattttggggtgctgagattctcccctagagacctgaaattcaccagctacagatgccaaatgacttacatcttaagaagtctcagaacgtccagcccttcagcagctctcgttctgagacatgagccttgggatgtggcagcatcagtgggacaagatggacactgggccaccctcccaggcaccagacacagggcacggtggagagacttctcccccgtggccgccttggctcccccgttttgcccgaggctgctcttctgtcagacttcctctttgtaccacagtggctctggggccaggcctgcctgcccactggccatcgccaccttccccagctgcctcctaccagcagtttctctgaagatctgtcaacaggttaagtcaatctggggcttccactgcctgcattccagtccccagagcttggtggtcccgaaacgggaagtacatattggggcatggtggcctccgtgagcaaatggtgtcttgggcaatctgaggccaggacagatgttgccccacccactggagatggtgctgagggaggtgggtggggccttctgggaaggtgagtggagaggggcacctgccccccgccctccccatcccctactcccactgctcagcgcgggccattgcaagggtgccacacaatgtcttgtccaccctgggacacttctgagtatgaagcgggatgctattaaaaactacatggggaaacaggtgcaaaccctggagatggattgtaagagccagtttaaatctgcactctgctgctcctcccccacccccaccttccactccatacaatctgggcctggtggagtcttcgcttcagagccattcggccaggtgcgggtgatgttcccatctcctgcttgtgggcatgccctggctttgtttttatacacataggcaaggtgagtcctctgtggaattgtgattgaaggattttaaagcaggggaggagagtagggggcatctctgtacactctgggggtaaaacagggaaggcagtgcctgagcatggggacaggtgaggtggggctgggcagaccccctgtagcgtttagcaggatgggggccccaggtactgtggagagcatagtccagcctgggcatttgtctcctagcagcctacactggctctgctgagctgggcctgggtgctgaaagccaggatttggggctaggcgggaagatgttcgcccaattgcttggggggttggggggatggaaaaggggagcacctctaggctgcctggcagcagtgagccctgggcctgtggctacagccagggaaccccacctggacacatggccctgcttctaagccccccagttaggcccaaaggaatggtccactgagggcctcctgctctgcctgggctgggccaggggctttgaggagagggtaaacataggcccggagatggggctgacacctcgagtggccagaatatgcccaaaccccggcttctcccttgtccctaggcagaggggggtcccttcttttgttccctctggtcaccacaatgcttgatgccagctgccataggaagagggtgctggctggccatggtggcacacacctgtcctcccagcactttgcagggctgaggtggaaggaccgcttaagcccaggtgttcaaggctgctgtgagctgtgttcgagccactacactccagcctggggacggagcaaaactttgcctcaaaacaaattttaaaaagaaagaaagaaggaaagagggtatgtttttcacaattcatgggggcctgcatggcaggagtggggacaggacacctgctgttcctggagtcgaaggacaagcccacagcccagattccggttctcccaactcaggaagagcatgccctgccctctggggaggctggcctggccccagccctcagctgctgaccttgaggcagagacaacttctaagaatttggctgccagaccccaggcctggctgctgctgtgtggagagggaggcggcccgcagcagaacagccaccgcacttcctcctcagcttcctctggtgcggccctgccctctcttctctggacccttttacaactgaacgcatctgggcttcgtggtttcctgttttcagcgaaatttactctgagctcccagttccatcttcatccatggccacaggccctgcctacaacgcactagggacgtccctccctgctgctgctggggaggggcaggctgctggagccgccctctgagttgcccgggatggtagtgcctctgatgccagccctggtggctgtgggctggggtgcatgggagagctgggtgcgagaacatggcgcctccagggggcgggaggagcactaggggctggggcaggaggctcctggagcgctggattcgtggcacagtctgaggccctgagagggaaatccatgcttttaagaactaattcattgttaggagatcaatcaggaattaggggccatcttacctatctcctgacattcacagtttaatagagacttcctgcctttattccctcccagggagaggctgaaggaatggaattgaaagcaccatttggagggttttgctgacacagcggggactgctcagcactccctaaaaacacaccatggaggccactggtgactgctggtgggcaggctggccctgcctgggggagtccgtggcgatgggcgctggggtggaggtgcaggagccccaggacctgcttttcaaaagacttctgcctgaccagagctcccactacatgcagtggcccagggcagaggggctgatacatggcctttttcagggggtgctcctcgcggggtggacttgggagtgtgcagtgggacagggggctgcaggggtcctgccaccaccgagcaccaacttggcccctggggtcctgcctcatgaatgaggccttccccagggctggcctgactgtgctgggggctgggttaacgttttctcagggaaccacaatgcacgaaagaggaactggggttgctaaccaggatgctgggaacaaaggcctcttgaagcccagccacagcccagctgagcatgaggcccagcccatagacggcacaggccacctggcccattccctgggcattccctgctttgcattgctgcttctcttcaccccatggaggctatgtcaccctaactatcctggaatgtgttgagagggattctgaatgatcaatatagcttggtgagacagtgccgagatagatagccatgtctgccttgggcacgggagagggaagtggcagcatgcatgctgtttcttggccttttctgttagaatacttggtgctttccaacacactttcacatgtgttgtaacttgtttgatccacccccttccctgaaaatcctgggaggttttattgctgccatttaacacagagggcaatagaggttctgaaaggtctgtgtcttgtcaaaacaagtaaacggtggaactacgactaaa

SEQ ID NO: 13 - DNA, 32743 bp, Homo sapiens
cttgtgggaactgtcagaccagctccaggcgctggggctttctcagtggccttgtcagctcacagcaggcgttaacagcctctaattgaggaaactgtggctggacaggttgcaaggcagttctgctccccatcgtcctcttgctgactggggactgctgagcccgtgcacggcagagagtctggtggggtggaggggctggcctggcccctctgtcctgtggaaatgctggggcaagtggtcaccctcatactcctcctgctcctcaaggtgtatcagggcaaaggtaaggaggtcctacctggcgtggggcgagggagggactaggagctgtgcccctcagggagatcagagccagagcctctgcttgtgccacatacacagtcatctggaacttgactccgagcagctcctgacagctctgacagtctaaatcagacaggacaggctggcagtgcactgggaggtctgtgagaggggtatctggccctgccaccagcaatccaggaagtcttgggtgaggagattccttcccactggcttcaatttacccttccgtgtagtggagagagaagcctccttccagccgcctgtaaagatgatgaaaattgcatcctccaattgtggcatgagagaagagaagcagtcccaaggaagtgggtggttctcgagctcagagacagatggatggacccctgaggcaggaaagctgagcccagggaggggagggcgaggccagcagccaggaagaagctggaaggcatggtccctcatctccccggcttcttcagccatccagatgccacaggagcctggaaattattagggacatgcagggttggggcagaagaaggagacaatatgaggaagctccacagcaaacctaaagctgtcagccaggcatggagccatctaacatttactcctggggatcccagctgagggctgctcccctctttctccagttctggggtccaggatgctctgaaacctggatcccgcatttaatttaattgaattaatttatttatttcatttttaatttttatttatttatttattttttgagacagagtctccttctgtcacccaggctggagtgcagtggcgtgatcttggctcactacaaactctgcctcccgggttcaagtgattctcatgcctcagcctcccgagtaggtgaaattacagacgtgcgccaccatgcttggctaatttttgtatttttagtagagaccaggtttcaccatgttggccaggctggtcttgaactcctgacctcaggtgatctgcccaccttggtctcccccatccaaagtgctgggattacaggtgtgagccaccatgcccagccagggttctgcattttagatcagtgactctgcaggggcttcacggaggtggagagcgtggaattagaggagggtacactctgggcacaaagaggggaaactgaggcatagtgttgtgtgggttcagggccaggtagaagccccatatgcaataaagtcccatgcccaggtactcaattcagttaccgagtccctgagcattcttgtgtccttcaggaagacacagtcaaggctcaggtggactcaacatttgtaaggatgcaggcagcctagggcagagcatgatgaggaacagggagcagggagggaggagtggagcctgcagctcttgtgggtgggttggggggcctagtggcccaggattctaggcaggagagctaggttggaacctggtctaaggatccttgaatgcagctcagacagccgaaggaggactgatgggattggtgcctggctgtggggatgagagtaacagagaagctgaggttatgaccctgaggtcatgagcctgtgtgacagagggcaatgctccctccacccccattcccagggcttcagcaccatagctgggcttggctatgccggcccttgcacggtgaagctggtgagtgacttgttaggcacagggagggatggacttgggtcttcctgagctgcttcctcctccatcctgtgtctatagggcaggcctggcataagttgactgaagctgctctatttctttaatttttaagctttttagtttgaaataattgtgaagttccagggaagctgcaagaatagttcaaacgattcttgaatttctttcatctagattcaccaattaacattttatcacatttactttatttctctttctctagctgtatgtatatgtgtgtataaatgtacaataatttttgctgaaccacttgagaacaagttgtgacattatgtccccttactcctaaatattttagcacttatatcctatgaacaaagacattctcatgttactacagcacaattgtcaaattcagtaaatttaacattaataccatcaaatatgctttccatattcacatattaccaattgtcccaagaatatgctttattttttttttttgctgacccaagatgcaatcaagatcatgtattacattcagttgttatgtttctcatgttcagtctatgaccatactttaacctttcttcatctttcatgatattgcattcttgaagaagacaagccagttgttttgtagagggttccttaatctgggtttgtctgatgttccctcatatgattcaggttatcatatgcatttttatttattttatatcatcattattattattttttagagatggagtctcgctctgtggcctgggctggagtacagtggtccaatctcggctcactgcaacttctgctcccccgggttcaagtgattgtcctgcctcagcctcccgagtagctgggactacagatgcatgccaccaagcctggctaatttttgtatttttggtggagacagggtttcaccatgttggccaggctggtcttaaactcctgacctcaagtgatccacccacctccgcctctcaaaagtgctgggataccaggtgtgagccactgtgcccggcctattattatttttcaagagaggatctggttctttcacccagactggagtgcagtggcatgctcacggctcactgtagcctcgacctcgcaggctcaagccatcctcccacctcagcctccctggtagctggaactagaggtctgtgccaccatgcctggctaatttttttttttttttttgtagatacagggtttccccatgttgcccagggtggtcttgaactcccgggctcaggcgatccacctgcctcagtctcccaaagtggtgggactacaagtgtgagccatcatgcctagccatcatatgcatttttaaaattattttttctttaaaaaaatttttttctgtgcccattgacagcagatattatatgcatttttgacaggaataccacaaaagtgatactgtgtctttttcagcgcatcccatcaggagtcatatgatgacagtgaaatttaaaaaaccactttgtttactgaataatttaacaggagtactatttatgtaagatgtgcatataactcttgagcattgcgaaattcttccaaagacttcttctttcatgcagagtaaaagccatgcattttacaatggtgcgtgacctggcgtccaagacccactcctctttgtctctcctcttgctcacagcatttcagccatgttgcctgctggtcctggacctcgctctctgttgtatccacagttttctctgcctgggatgctgctcctttgctggctacatggcctcttccctcaacccctcagagttttgctcaaatacctccttttcagtgatgccttccccactgaaaatgtcagcctgccattctgcaaactcttagctctctctccacttaatttttctccatagtcctcatctccatttatgttccatcctgtttacttatgtttttcattttctgtctcccagtctcctcttcagccccctagactgtaagatccttgaggccagggcttttgtctgttttgctcaccgttgtctcctcaacatctagagcagtacctgccacaagtcaaccctcagtagatacttattttcacaatagcagccccctctctgttcccattctttctctggatatattttgaatagctctgaaccagggctattgaggattcagtggcaagtaagtccagggcccgtttgttcagagagcttgcgctagattgcctgagtcactgttactacagttgtgattagtgcctggtgcagtgccaatgcagtaggtgttcaaaacatgtttgttgagtgaataagtgaattattttcaggcatcttaacgggcagcctgggatgttttttgggttagacatattgggaaggagggatcttcaaatcattgcccagggaataggcctgggccctaaaattcattttagacccaaaattcaggtttcagttgtccgttctgaggaaaccccaaaggacacacaggctggaggctatgaatccccagatgctttacagcctgagttgagatctgctggacaataaaagggcacaggtgacaccttatagattagctccaagggttgccagctgtttgcgtagattgtgttggaactgtcacttctcagggagtggtgtctaactgcgactgctttggctgggatccaggcaagctgtagaagggctggagtcgtttttgctcttctcttcctcattgcacctcccctccaacaaagggtgaatggcaaagtagctggacacagaaaagagattggaattcaatgtaccctgggctacagcaccatccagaaaggaatccactgaaatcacttcaaggagagacagggcatgtcttgtttttttttttaattttttatttttatttatttatttttatttttttgtgagacagggtcttgctctatcacccaggctggagtgcagtgatgtgatcacagctcactgtagccttgacctcctgggctcaagcaatccttctgcctcagcctccttagtagctgggactacaggcatgtatcaccacacttggcttatttttaatttttgtgtagagatggggttttgctatgctgcctgggctggtcttgacctcctgggctcaagcaatcctcttgccttggcctcccaaattactgggattacagatgtgggccactgtgcccagccaggccattgtcttcacagacaaacctctcttattgaagtgcaacatacagaaaagtacacaaaattacaaatgtacatctcaatgagctattgttaaatgaacacactcttgtgtctaccacatgttctctcccattcattacttcctctgtcttccataaatatagccacaattctgacttctaacatcacagatttgttttgtccgtatatatggaatcaaacggtatgcactcttgtgtctgactacttttgctcaacatcttatgagatttatgtatgttattatttgtagcagatcattttcatggctgtatagtattttatcgcatgactatatcatagtttattcaccttttctattattgatgaacctttgggttgctttcaattttgtttttgctattataataatgctgtgatgagccttttgtgcatgcatgtctgttgggtatatctctaggggcagaaccatggagtatgtgtacgtaactctagcagatgctgtcaaactgttttccaaagtggttgaaccaaatagtgcatgagagttccatgctgctttggggccactggcttttggttctgaaggtctgcagatggaaaattaaattgtggaaatgtggagcttggcaagaggccaaaggcaagggaattacagctctgtgatttctctggtatcctgcatgaaattctgacaatagagtcatttttaggagttatgtgagatgcattgttgaattaattaatttaaacggattcatgaagcccttgcttgggttgttcattttgctgttgtgacgtttgaatttcttgtctattctgcatattagttgcctgtaggattcatagtttgcaattttttttcctattctattggttgccttttcactctgtgaattgtttcctttactgtacatgatttttttttagtttgctgtaataccatttgtttattttgcttctgttgcctgtgcttttgaggtcttattcataaactctttccccagcccttattatgctccaagaactatgcaaggttttgtgggggaaacaaagatgaaacagatgtctattctacccttaagaatctttcagacagaggaaaatgggtatgtataattacaactataagggaagatggaaatgctatgtgtcattaacaggcaagatacatttagaataaaaaaggagctaagaagatgaagattccttctaggtaggaacactggggaactggccttgaagaataaataagagtttaggaggtaggtacaaagtagaaggacaattgaagcagaggaaacagctcagaaaagccagggttgcatggggtttggatgggaaacaggaaagggagatgcacttgttatcatggagaaacaatatcacatatgagatgatttggttaactgatgcaaagagtgggacttgggctaggtgagttttgacagaggtaagggagttgcattgcctgaggaagagagttaatatggtcagtatgaagctaaatagagaggaagaaagaaatgggatgtgggccctataggatactttatctatcttatgattttgccctgactagagctggattgccccagtacttttggaatctcactggactctgttcacttagtccccagcaggtacatcttttgatgccttcaccccaagcctggtagcacaagccctagctgagaaaaccttaacatctatttgttggctggtggaaattccacttgctctgagaccctcccgtgctccttctcccaggtgctcaggccccacaccttcctccgactggcaggtccaggttggaggaagctgagctgactcagagctctgcacatgggctcagggctgagcgggactcactgctggatcagattgtctccttcaccatcctctgtacttgtctccttgaccatcctctgttcttcctgaggctgcagtggagttaatcatctgccctctgccctccctttcagagttactagttcacctcatccgttcttaaccacaggaaggtggcccccaaagctgctgagcagtagcaacagcagtggcaggggcccgggggccttcctggactgtggcctctttcctctaaacaattttcacttgttgggtcctcctctatgcctcactaaatgtgtgagaacttgtgttgaagttatgttttcgtagtagcatttcatctcccctatctggtgtgtgtacccctctgggacagaaactgaggtctttctgtatcagtcacaataccctggacatagtgacttgtctacttgccttttcaccgtatctgctttgcacccctgccctggcacccaccccttccaggccgtccatggaaactcattccaaccatcttcctccttcccacactggactgttgggggctgcaggagaaaattcagcaacaaagagcagctacagattcgtaatctccaaccccagctggactctcagtgtcctgggaatcctcatttctggcccacagcttctcctgttccccaaaaggtgggagaattccacaccttcgtcatctctttcaaggccctgttccactatctcagcctccacaaaccaacaacctccttctttaagaaaacagaagcacaagttagggattccaccaaccttgccaacaagtctccagtgtcaatgtacttcatctactcctgtaaatggccacatttgcctctgctgagggcaagagtgttcttgccctgtccttgaccaatactcccctgtgtgctcagggcaccagagcttctttcagaagtcacctgggacctgctgtctgtgaagacatccctcatctttcttcagctgctccttttctgtgggcttcctacctttagtacagtttccttccagttgaaaaatcaaaacaacacctggtgttctctctagctcctttttatttgcagacaaaccagtcttaaatgtataaactaatataatattacataaaaataaaatataacggcctaatttttaaaaagaccccaaaggcagtatagcatgaggactgtagatcacacatttcattctttaagtatttagaagtctatggctgggagtggtggctcacgccagaactttgggaggctgagacgggtggattacttgaggtcaggagttcaagaccagcctggccaatatggcgaaaccctgtctctactaaaaatacaaaaaaaaaaaaaagaatagctgggggtggtggcaggcacctgtagtcccagttactcatgaggctgagacaggagaatcacttgaacctgggaggcagagattgcagtgagccgagatcatgccactgcacaccagtctgggtgacagagcgagactctgtcttaaaacaaacaaacaaacaaagaagtctagacaataacttaaccattttcctgtgtgattcctattcagttttataatagcagagaacaaccttcttctacatagcgctctacattctgatctactggtggattatatgggagtttacgttatttttcattacaccgtatatttatatttaagtaccttttaatacttgtgctacctctcacaattttataaaagataaaaataaagtgaaaccaccactaaacacctgaaaattaaactcatgttccatcaccccattctccaaacctgctccatctttaccagacccataagccacacgtgtgttttgtgttcccttaaccatgctactgctgggtccataatacccaccttccctgttcctttctgcatacaccaggcaggccttggctttttctttcaatggcagctcccacccaccgcctctgggcagccactcctaactctgcagggcagaggaaaacatgctttccttatgcttgcctcacaccctgggcacacctccatagcacattccatattgcatttcagttggctgttttaggtctatcttcctttttcacttttttttttttttttttttttttttaggcagggtcttgctctgtcacccaggctggggtgcagtggtgcagtcatggctcactgcaacccctgcctcccaggcttttctgatatttagctaagagttgggtttagctgagatgagtgaggaaatctacaaattcacttgctatggtaatgtttccacaatgggcaagtcatattttgcttttatcaaagtacatcttagttaatagtcagaacagttgagtgagaggtagtcattactctttttctgcttttttaccaagatacaactcacagctgtgtgcacaaaatttaaatcaacagcttgatgaacttttatatgtgtaagtacatatcaaaactacccacatcaagatgtaacacatttctagcacccagtcattcctttttggcccttcaagttgataacccccctcctgcaagggtaatcacattctaacctctctcaccatatattagtttttccagattttaaactttatatcagtgaaataattcactatgtactttttggagtctagcttcattaatactcatcattgtggtgagatccatccacattattgccaggaaaagtagcttttctttttcattgctgtgtaatattccttataagactataacacgatttatttgctcatctaatcgtgatagacatttgggttttttctcattttgagttattatgactaaagccattattaacactcttgtacatatttttagtggatataaacaccagattttctttttttttgagacggagtttcactcttgttgcccaggctggagtgcaatggcatgatcttggctcactgcaacctccgcctctcagatttaagtgattctcctgcttcagtcttccaagtagctgggattacaggtgtgcactgccacgcccagctaattttttttcttttttttgagatggggtttcaccatgttggccaggctggtctcaaactcctgacctcaggtgatccgcctgcctcgacctcccaaagtgctgggattacaggcatgagccaccatgcctggcccagattttcttgtgtacaaattcttctggatcaaagggtatatgtaagtttagttttagaagataccgtaaaatagttttccaaagtgctggtaccaatttacactctcactagcaataaatgagaatctcagttgctcccatctctgtcaacccttggaattttcacatttatttatttacatttattttcgagaccaagtctcagtctgtcacccaggctggagtacagtggcgtgatcttggctcactgcaacctctgcctcctgggttcaagcaattctcctgcctcagactcccaagaagctggtattacaggcgccaccaccgtgctctgctaatttttgcatttttagtagagatggggtttcaccatgttggccaggctggcctcgaactcctggcctcaagcgatccacccgcctcggcctcccaaagtgctgggattacaggcttgagccgcttcgcccagccttcagacctttaaatgttagctattttggtgggaatgtgaaatctcattattctctgataactaatgttgttgggcacccttatgcatgcctattggctattggatattctctttcctaaagtgcctgcccaagtctgttgctttttttgtcattattgtcatcagtgtattattgatttccagtctattattgtcatcagtctattattgatggaattctttatatactctggatatgagccctttttcaaatgtatgtattgcaaacattttctcccagtctttggcttgctttttcactctctcaatgttgtctttcaccaaacagaagttctaagttttagtgaagtccaatttatcaatattcttttatggttagtgatttatttttgtgtgtgtgtgtcctgttaaagaaacatttgttgtctgggtgcagtggctcatgcctgtaatctcagcgctttgggaggccaaggcgggtggatcacttgagcccaggagttcaagacaagccttggcaacatggtgaaactctatctctaccaaaaatgcaaaaattagccagtctcataatctggtctcaaaataaacataaaaatagattaaaatgtaaaaataaaaaaggaaacatttgtctatctcaagatgtagaagatattctcttgtgctttttcctggaagctttataggtttagctttcatatttaaatttatgatttgttttaaattaatttttgtatatgatatgagggagatatcaaggttttttttccttatagatatcaatttgaccaagcaccatttattgaaaagatcaagtatgtgttggtttgtgtgatattgtgaaatatatatttggttttcaacctcctttcctggcatacaattcctaaaatttttagaaattccgaagtgatgtctttttgtaggctaatgaggtgaccgatggctggcagcctgtaggcagcttcgggataggggccggtcaccagaaagaccaaggcagggttggaatattggactctgagcccgtccccaaccttcaggaaaaggagagggattgaaggttaagttgatcaccgatggccagtggtcaatcattcccatttattgaggcctccataaaaacccaaagaacaaggttcagagagctaaacatgcggaggttcctggagggtggcacgccctgggaaggcatggaaactctgtatcccttcccctacaccttgtcctatgcatctcttcataggtaccctttgtaataacctttataataatccagtgaatgtgtttccctgagttctgtgagccatctagcaaattaattgaacccaaggagggaataacgggaaacccagtttatagctagttggtcagaagcgcaggtaaaacaatctggagcttgcagttggcatctggtggatatctacaggtagatagtgtcagaattgaactgaattagaggacatccagttggtgtccactgaagagctgattgcttgcttggcacgtgggaaactccccacacgttggtcacagaagtcttctgtgttgattgttgtggtgtgaaaccagaggaaaaacagttagtgtttttcccacacacagggtctatttctagactattatattccatcgactacttttcaatccttgcaatactggaatgctatcttaatttctgaagttttacaatatatcttgatattaggtagtgaaaaccttctagctttgttcttcatcaagattgccttggctattctatgtcttttacattttcatataagttttagaatcaacttgttaatttctataaaaataacctgcaataatttttattggaattctattgaatctataaattaatttaggaagaattgacatcttagcaatattaagtcttccaataaaaaccatggtatagtctcctgtttatttagctctttaattttttctcagcaatcttttgttgcaataggtgtataggtcttaaatatttcttcttgaaattatttctatatattttatcttttttgtgctgctgtaaatagtattgttttcaaaatttcatttttatctgtttgtactaatatatagaaataaaaatgatttttgtatattgaccttatatctagcaattttgcaaaactgacttctacactcaaataatttttcatatagtcctcttggtttcctatatacacaggtatatagtttgtgaataatgacagtttcacatattcattttttttttgagatggagttttgctcttgttgcccaggctggagtgcaatggtgccatcttggctcactgcagcctccgcttcccgggttcaagtgattctcctgcctcagcctcccgagtagctgggatttcaggtgactgccacccgcctggctaatttttgtatttttagtagagatggagtttcactgtgttggccaggctggtctcgaactcctgacctcaggtgagctgcccaaagtgctgggattacaggcgtgagccactgcgcccagcctcacatattcatttctaatttttattccctttgactattttccttgttttgttgaactagccatgacctccagtacaatgttgattaaaagaggtaattatggaatcctttttctgttcctgagtttgcagggacatggatgaagctggaagccatcgttctcagcaaactaacacaggaacagaaaaccaaacaccacgtgttctcactcaaagtgggagttgaacaatgagaacatatgggcacagggacgggaatatcacacaccagggcctgttagtgggtgaggggcaaggggagggaggcattaggacaaatacctaatgcatgtggggcttaaaacctagatgatgggttgataggtgcagcaaaccaccatggcacacgtatacctacgtaacaaatctgcatgttctgcatacgtatcccagaacttaaagtaaaacaaaaaaaaaaaaaagaaagagatgggtacaaatgtgaatgtttgttgttttgaacaaacctctccaaccatgtttttcctctgctcccacatcaaaataataacaatcatcaacatagaagacttctgtgaccaaatgcagggaggtggatttctcctcacagcaaactgaataatgtattctgcagtggacaccagctgggtgttctccaattcagttcagacactaactggagagagtgtcagaccacagaggctgggggctcagtccccaacaccacccctccaccacaccagttctaagtctgggcctccagaacttcggaccaaccagcttccagttggggttctcacaaccccctccttgggttcaattaatttgctggagtggctcacataaaccagggaaacatttatgtttgctggtctattataagagatattacaaaggatacagatgaagagatggcatagggcaaggtatgggggaagggacacgaagcttccatgccttccctgggcacactgcatgccaggaatctccagctatctggaggctctccaagcccagtcctcttgggtttttatggagacttcacttcataggcatgaccaacaaccttgtagaaatgtgactggatgaaaagggtatgattccatactaacaggctgagtggagaaacccagcaaggcctgtctgttcagattcttcttggtctctctgtgtagcatttctttctctagaatctgaggcaggaacttctctgaaatgagggtcttttgatttatatcagattagagttgtctacactcagcaatggtgatcttcttgctggtcttgccattcctggacccaaagggctccatgctgtctgcaatattcatgccccctttcaacttgccaaataccacacgcttgccatccatccattcagtctcggcaatgtagatgaaaaactgggaactatttgtgttgggtccagcatttgccatggacaagatgccaagacctgtatgcttcaggatgaagttctcaccatcaaatttcaccccatagatgaacttgccaccagtgccattatggtgtgtgatgtcaacatcctggcacataaattctgcaataatcctgtgagagcaggagctcttgtaaccaaatcatttctctctagtgctcagaacacaaatgttttctgctgtctttggaactttatgtgcaaacagctccaaggagacacggtccaagggttcatggtcaactgctatattaatgaacatggtggggttgactacggttgatagcaagagactctaggtggtgaaggcacctccaaagcaccaggtatatacattttaacacttttatttaatgaatttacttttggctttgctaattttctctattgtgtatttgctttttattttattgaagttagctcttacatttactttctcctttctcctttctctggattatcatcatcatcatcattatttgaattactatttctttttctttggtttcttgagattgaatcttgcattattgacttgcaaactttctttcttttccaatatacaaatttaaagctataaatttccctctaaacactgccttagctatattgcacatttgatactcattatcactttgctctaaatatttcccaaatttcatttgatttattctttgactcatgggtttttagaaatatgtttcttatgttttaaacattcagagattttctggttatttttctgttattgattttttgtttaattctactgtgcttagagggcataattggtatgatttcaatactttgaactttgttgacacttgttttaatgcacagcatatgataatactttggtaactattgcatgtgcacttgaaaagaatatgtattctgcaattgttaggagaattgttttatatataatttatatatatattggtttaatgatcttcaaattcttatagccttattgatttttttgtgtgcttcttgtagcagctagagagacagatgtaataaaactctccaactatagttgtggatttacttctccttttagttctatcaaattttattttatatattttaaacttgttatatgcatagaaactgaagatgattgtttattcctacttaattggttcttttataatgatgacatttccttctatttctgtatattttttatacatcttatgtctttttttgttcattttctccgttattgccttcttttgtatttaattgatatttttgtgctgcatctttttgattcccttctcatttctttttctgtacattttgttattttctcaatggttaccacaggtattacaatgaatacctccaacaatatagtttgaattgatgccaattcagcctcaatactatagaaaactcctatacagctctatccccccacttttattgtcacaaattacatctgtttctattgtttttcacttcttgtgcctgagtttccattttctttatatctaaagaacatcctttggtatttcctttactgcaggcctttttgtgacaaattctttccgtttttaattttttctaaaaatgtctttatttcagcttcatttaaaaaattattactattttttgagacagtctcactttgtcacccaggcaggaggggagtggcaccatcttggctcgctgcagccttgacttcctgggttcaagtgattctcgtgcctcagcctcctgagtagccgggattatgggcgcgtgccaccacgctcagctaacttttgtatttttagtcgagatggggtttgccatgttggccagcctggtctccaactcccgacctcaactgattcacctgcttcagcctcccaaagtgcggggattacaggcatgagccactgcatctgctttcatctttgaagtaccgaaattctagataggcagttattttctttcagcactttaaatatatcattccttggaaaaccaaacaacgtatgttctcactgatacgtgggagttaagctacgaggatgcaaaggcataagaatgatacagtggactttggtgacttgggaggaaaagtgggaggggagtgagggataaaagactataaatagagtgcagtgtatactgctcgggtgatgggtgcaccgactcacaaatcacctctaatgaactttctcttgtaaccaaacaccacctgtaccccaataacctatggaaaaataaaaaaaaaagataccattccatcatctgctttttattatttttgctgaaatgtcagctaagttgtttgttttgtgaagggaatttagttttcccccactctggctattttacgatttttctatttatctttggtttccataatttttttgatgtattgagaggttgtcttttgttcattggtttgttttttttctttttttttttttgagacagagtttcactcttgttgcccaggttggagtgcagtggcgtgatctcggctcactgcaacctccacctcctggattcaagtgattctcctgcctcagcctcccaagtagctgggattacaggtgtgcaccaccatacttggctaatttttgcatttttagcagagatgggattttgtcatattggccaggctggtctcaaactcctgacgtcaggtgatccatccacctgggcctcccaaagtgctgggattacaggcgtgagccaccgtgcccagcttgtcggtttgttttgatcttgcttggggtttgtaacacattttacaaatctatcttgatggcttttgtcagttttgggaaattcttatcttttatctcttttgcttagttcctctttcctctctcgtctccttgctttccaattacacttagtttaggggttttgttttgtttttgctatatctcaaatatcttttacactccttcttgtgtatttttatccttttgtttttctttacttcactctggatattttataacagttttctaattctcttttcaatggcatctaaatggcctttttaacctttcaattgagtttgttttacagttattttacattttatttctgtaattttcattgaattctttaaaaaaaatccaatttcaggtaactattgctgcataatgacctactccaaaatccagtagtttaaaacaactacctatttagttagtgattctgctagttggcaatttgggctgggctcagctaggtggttcttttggtttcctcttgcatcagtcatgcatgtgtggtcagctgccagactggccacgggtggctgattcatttatttattttttattgttttttgagattaggtcttgctctgtcatgcaggctagagtgcagtggcatgatatctcggctcactgcaagctccatctcccgggttcaagcagttctcgtgcctcagactcccaagtagctggggttacaagtgtgtgccaccatgtctggctaatttttgtatcgttagtagagacgaggttttaccatgttggccagggtggtctcgaactcccgaccttgagtgatctgccggccttggcctcccaaagtgctggaattacgggcatgagccaccgcaccaggccagggctagctgatttagaatggccttagctgtgttggcttatctctgtatcatgtgatatcttattctccagcaggctattttaggcttgttcacaggtcagccagatgaggttccaagagaacaagtagaaatgtgcaatgccttttcagatctaggcttagaactagcagaacatcatttttgctgcgtttcatcatgaagaccagcccagttccaagagacagggaaatgaaccccatttcttgataacagaaggagctgtaaagtcacattgcaaggacatggtatttttgcattctatcacgctagttctctgctgaaattcttaaacttatgttttatttccttgaacatattagacatgattactttaaagtttatgactgacaactctattatgtagatgccctgtttgttggtttctgttgtctctattcttctgttggtttttggagatgtttccttttcttatacttcactttggatattgtgtatgaaacattctaggaataatttaatgctctggttgatgttattttcctctagtcataacttatatttgcctctagttggcagccaggttagggctaccagagattccagatcattagttcaatccagggttgtgatgattcaaaattgagcttcagttcctgtgagggctgttcatttctcgttcactcttactctttgggtatagccctctgtggtaccaacctcaacactgatggattttatgtatacccgctttctaataggagggacgtgaacttcatgttctcttagttccttgagttttattgtgagctctgctcagcttctcagccttttagctgccatttatggaatcagaagatgcctccagggaacaacagtcagaaatgctgatctcacctctctgaatttccttcttccagatattggccccataatttttcactgctttataaactctctgataactttaacaatgtgcttttacatgttgttcatttttcttctagctatttttagtgggaggattggttagcatgtcttaacctggattttcattacataattagaattccttcgatgattttttatctcaacaattaaggggatgctgtagaatgaaagtgttctgtttccagatcacaaactctctggagtcaggaatcatgccttatacatgaagaggccctgcctcttcaggggctggattgcagtgggactcagtaaggactgaataattgatgaagacagtatatgtcctccttgtaggtttagtaatgattttttccattcacctttgttctcagggtctttgtgcaatatttggtaggttgacttgttcttataaatagtgctaggatcgtaggagacagagacacagagatgcacagcacagtctctgcttttgagaagcttttggtttgctaatgggcagagccagtacaagtcatataaatataaatgggaacctatgtgttttagtcttaggagcatcaagatcaaagaaacatatttcatcaaacaaatagtattacaagtcctttaattatttacttagtctcttgagaaaatgccagggtgaagctgtggcttggagagactgcattcataatgcactggacatataaaaacccctctgtctcaattgctctcttcttaatagcctccattttaacggagccacttgtaaaactctccccatctcttattttctcttccaaatcctccctgagcctccccaactcacccagagagactttttaatttcctgcacctgctgggccatgccacatagctttattactaaaaatggctgtaggaacttccagttttgtacactgactgcacagaattgctctaggttgtcacacccccatattcattaggtttcatcttgattctttgagaggcaagtgctgggatctgcctgggaagtgtagttttatttttaaaattgttttctagggagaaatttttgtggagactttctgatcactgaaaaactggcaaacatcaataagtaatgaccaaaatccaatgaaccaagtgccacgagagaggattatgtattcagctctgtgagaggatggttgaggggccatgagttcagcttggacggttagtcttcctgggcctgaccattcagaatttccaacagtcactacttgccattagtagttgcctcagcactgcttggagggagtcaccttagatgtggtatttatagcatcatggttaagaatttatcctctcaagccaaactgctgtctttacaaagagtaaacaaataagctccctagcacctgtgctcccagctactagggaggttgagatgggaggatcacctcaagcccaggagttcaaggctgcagtgagctgtgattgcgccactgcactccagcctgggtgacagagtgagaccctgtctctagaaaacaaaacaaaagaaaacaaaaacataacaccaaactgactaggtttcaggctcatcattcttttaactcatcataccttttaacttaaatagttaaaatgtataaagtgtgaaacctgcctgtcacatagtaagtactcaagattttagctattggtctatgggatccctcagactagggacacagagcttggggacaaggggaggcagatggaggggatatgctttaaggtgctcctaggttctgggctcctcatactcatccccacccaattggcttaagggaagtcacatccagctgcccacattgctcaggcctgacactcttcccgctactttcagcttgggttctctttcctaggatgccagggatcagctgaccatgtggttagcatctcgggagtgcctcttcagttacaaccaaacagcatacagacgaaggttgacagcattgcatggaagaagttgctgccctcacaaaatggatttcatcacatattgaagtgggagaatggctctttgccttccaatacttccaatgatagattcagttttatagtcaagaacttgagtcttctcatcaaggcagctcagcagcaggacagtggcctctactgcctggaggtcaccagtatatctggaaaagttcagacagccacgttccaggtttttgtatttggtaagtctccaggactgttcatactgccctctctgattcctataggcctctaagttctgtatttccaatgcctttctgatcagaatctctgcttccagataaagttgagaaaccccgcctacaggggcaggggaagatcctggacagagggagatgccaagtggctctgtcttgcttggtctccagggatggcaatgtgtcctatgcttggtacagagggagcaagctgatccagacagcagggaacctcacctacctggacgaggaggttgacattaatggcactcacacatatacctgcaatgtcagcaatcctgttagctgggaaagccacaccctgaatctcactcaggactgtcagaatgcccatcagggtaagtggaacacactgggctataacaagcgctgaaggtttggaccccgcaaccaggctcatgtgcaagacagatgtggtatgagataaaatcccttggcctcctctcccagtgccttgtagcccttcccagggtagccctggcctccaggcacacagttcctgtaaagctaggcctatcctactctggaaaaaaatgttatccctatttccttctgggagatgcaagcttttcttctgcagagggagggcatagttgtttggtgagtgacagtcctgaaatggctcctgaacattattttcttcctgggagaggctgatggagaactgtcctctcctcttgagtgataactttctccaagccacatagttcaagaggtaactacactgtgcagcagtagcctggagcaggagcatcaggatgaccccagggatacctagatgagttcttgggctgttgcttatgctcatcctaagagttacctgagttaccgttccacaactttttattacataaacagggacttaatgtaccagcagcatgggcattataggaaaaaaaaaccatacagctctcattcataaggaacttatagccaaatggggcaacaaaaataactacttgtggacaaaaaagaaacaagactgaggcaggccgggcgcagtggctccctgtaatcccagcactttgggaggctgaggtgggtggatcacaaggtcaggagtttgagaccagcctggccaacatggtgaaaccctgtctctactaaaaatacaaaaaattagctgggcgtgttggcgggcacctgtaatctcagctactcaggaggctgaggcaggagaattgcttgaacccaggaggcggaggttgcagtgagtcaagatcatgccactgaactaggacactggcttcatcattcagaagctctgtgatctcttagaggtcaggtgtggtggctcacacatgtaatcctagcactttgggaggctgaggcaggtggatcacttgagtccaggtgtttgagaccagcctggacaatatggtgtaatcccatctctatttaaaaaaaaaaaaaaaagaagctctgtgatctctggcagattcattaacctctctgagcctcaattttcttccccccttgagtaaaatgggggtgataataagtacctcacaggattgctgttaagagtaaatgagataatgtttgcaaagagccttgtcagcccttggaacacttaattccttttccttcctcttgttggctggattatatatcaggctacatgtgtgacacaaatcttttaagtagaagttcaaatgaggaagagccatgaaggaaggaatagtggaaaagtgagacggaaaacttgcctgtacaatgagtattttttgagttaaaaacaaaggaatggataaatgtaacatttgttgtgctacatgtccctcagtatccatgacgaattagttccaggacccacctcgcaaccacagatgccaagatccacgaatgtttaagtccctggcataaacaggtgcagtttttgcatataacctatgcacacatccttctgtataccttacttaagtcacctctaaattagttataatgcctgatacaatgtaaatgctatttaaatagttgttatactgtattgtttagggaataatgacaaggaaaaaggcctctacatattcaatacacatgcattttttttccctgaatattctggatccacaattcattgaatccacattgtggaactcaaaactttggagggcaactgtattagatcatgtaattaacccctataggtagataacgttatccccttttacaggtgagaaaatctaagaggctctgaggcatcttccaaaaataagatgacttgagaggcccagagaggttaaataaatagtgcagagctcacagggttagaatttgagccaggcctgtctgatatatctatgctcttggcatcactcagaggaggttaaccaaatgagcaaagagaaaaccttgaccgtgagttctcagagcacgaggcaatcagccacaacacagagaaaagtgggttttgaggcagcccctgcagcaggcaggtgggaaggaagaagagagcgagctgacagctcagttctcacgccttctgtattcctcagaattcagattttggccgtttttggtgatcatcgtgattctaagcgcactgttccttggcacccttgcctgcttctgtgtgtggaggagaaagaggaaggagaagcagtcaggtgagtggaaggtccttagggtggtgctcctgcctgaggccttggatcctgtgactttgtcctgcgtccagtgggatgtgtctgggagcacagcatctccttttcctcaacgagctttggtatgtttgtgtgcgtggtggcggggggcaagcaggttgctaggctctctctcccagttcatgccttctgatcccaatgcgcagatttccctgtagacagctggtttgggaggaggtgtgggaggggcagttcggttgctgcctctgtgctctttggggttcctgggaagagcattaacttgcctcctttctagaaccttttttaaggtttggccatttggggtagaggtgggacctgttagaagcaaaagcccttctggaggtttctgcagctctgctctttgttttcttcctccctcagagaccagtcccaaggaatttttgacaatttacgaagatgtcaaggatctgaaaaccaggagaaatcacgtatgtcatcccggaggctggggtctctctcagctggcttggaaaatgctctttcaatgatggttattcagagcagagggacaaaaaggactgaacgactgtccttttgatgtgaccctcagcccttccccatctatcttttctccacctgcttcctagttctggtgatggaggaaaagaggaaacaaaaggagcagaggagatgaaagggaggctgaaggggcatcttggtgcagaattgcacctgctgagaagggatggagcacaacagaaatcaatgacagaggcagagtgctgctgtggtatttgttgtctgaccacaaattctttttcctaatgagtcagggcttacattcatgagtcccttaatggtgacacaggctgggaagtgtgaccagccaaagcataatagttttgtagctggctcaataggctgcattcacagccttttggaagaagaggcctgagtgtggctgaggtactagagagagtaaccagcctggcacaaagcccaccagcctgagtaggctcctccaggagcctctcgcctgctcttcgcagcaggcaggggccaactctgcctgtcatccaagaattagaagaggaggaaattgcagagggcctgcagatgcccccactgctgtgtctcgcttagggcagatgtggtgacaggcccaggggaaaagctctgatggagcctaccaaactgctggcaggaagtggggcagggtgggtgaagtggggcggaagtgccttctttccactgccccctggcgctttgctgtggagacccagcagcacgcaggaagcacatgtggtggggctcttccgtgctggccacatacgtgaggccctgtgcagcctcgcagagcaggcaagcatcctctcccagatgcctctgggttcagaggctgttagagcagctccccatgcctgtttttttatttttatctttatttatttatttatttttgccccagcagtggctatgggaatgtgaaaaataaagcagtggctattggaatgtgaataataaaaggggactttgtttctctcactgctaccagactctggtacaaattcctgaaagcatgtgaatctacccacagccagtgatgcccgggtgcttgctaaaaataatctatttttccaaaaagaagatgacttgagattaggagaccacaggaggaaaaacaacttagagcaaaggaaacctctttgggattcaggcctattagcttacttcttccgactcaagagctcctccctgcctggcctcagccctctctggcctctccctattgtctcagggctccaatttgaaggcctaaatctcaagtttcatgtggtctcactttgagacccagctctaatctttctagaaacacttcacacgggtctggacgggagagaaaagcaacaaactcctgcagtattttaaaacacaaatgaagttattgacattgtcagatgcccatgactccccagcctctaaggacagctgacagttctctgcttctcttagcttcttcttgcttccaggaattttgcttgcaccttgcctaatgaaccctgctgcctccactggctcccagtagaacccaaactggcaatatgctttcagtggccggcagcatgaaatacctccaccaccgatttcctaaggggtaggaacaagaaaagggaagcaggaagctctgcttcctgctttggcccttgggttcagggctgcacccagcactatagctgcccagggcgctgacttgaggtcaagggcaaggtggcctcaaagatgatctagagagggcttaactgtgtttggtctttgaaatgtttaaactttctgaatttcagtgctctgaggtaaggctcagataacagccctactcagagctctgcaaggaagggtttctaagttactaaaggaaagaaagtgacagcattctctttgagcagggttgctggaacccctcacacctaggtggttccttgctcctgatactaatggttccactccaaactgctcttcttcctgtctcttcccatcttgggaggatcaatgactctccccagtcctgccacctccctcccagtctcctgaaaagccctcttctttgtgctgtttttccccactcaatctaaatctggacagaccgaactgtcgctcatgttaccccatctccatttcttgtgcaggagcaggagcagacttttcctggaggggggagcaccatctactctatgatccagtcccaggtacctctccagtttctctagtccattccatacctatctctggggtttcctaatgcccccctgaaactcacaccattgaatggcagaataagatcttggtgcttctagaatccagaagatagcttggcttcagttgcattaacacattatttgaaaagatccgtgtgatactagagcatcttaacacagctgggaagcctgatgtggacattccttcttcttccgtgtctggcagaaggtctggcccagataaagtctataggagcagaaacctggttaggggactcaacttctgctttcttgccctgctgctgcttctaatacttggggcccttgcactttttatccctattccctattatattcgttttcaggaaagaatgaatctgcattgatctcttttattttattatgacttagcaataatgtccattttcttttcttttaaaacaattttattgtttagagacagggtctctttatttattttttatttccataggtttttttgggaacaggtggcatttggtgtcatgagtcagttctttagtggtgatttgtgagatttttggtatacccgttatgagacaggatctcattctgtctaccaggctgagtgcaatggtagaatcatagcttactgaagccttgaattcccggcctcaagtgatcctcccacctcagcctcctgggtagctaggtctgcaggtgtgtaccactgcacccagctgtattttcttactaaatctcacataacagcctcatgaaaatagttctaatactttagatgtggtctacattccatatcacaatgaggaaaccgagactcaggtcaactgatatctcaaggctacatagctaggtagtggcagagctgagccaaagggtttctgagtctccattgcacctcctcatactccacctcttatattctgggattacagaaattcactcataaactggagaagcatcctttaatactgatggctaaaatgacattgataacccaggctgggacatctctcccaagggaaacactgcctcctggtggccagtaataaaagactttctgataaaaatggctttaaaaaaaagaaaaaaaaaattgagcaccatcttcagtttggtggctgagctgtggggcaaagaaaatctgattataagagcggttgatatctgccagttctctagtttcagccacattgaactccaatgagaggaatttctatcagtgcaagaaagaggtcccctcaaactatggtgttgggtgagaatgacagtcctcctctggagcatcttaaaaggagaatgtttacctgatttagaggacacctggttccagtccagggaagggaggcaagttgccaaagggaggcattgaggtgttgaggaaagagccctggagagtcttgggtttgaattctgcttctactgtgtacgcactgcctgacttgggctatttatccttttggagcctcatttgtggcatggggcaaattatgatcattcttattttataggagtgttaaaagagttagagaagaggccaggcgcggtggctcatgcctgtaatcccaacactttgggaggccgaggcgggcggatcacgaggtcaggggtttgagaccagcctggcccacatggtgaaaccctgtctctaaaaatacaaaaattagctgggcatgatggcaggcacctgtaatcccagctactcaggaggctggggcaggagaattgcctgaacccaggaggcagaggttgcggtgagccaagatcgagacattgcactccagcccaggcaatagagcgaaactcttgtctcaaaaacaaataaacaaaaaaacagttagaggagaatacatgtataagataaatgctcaacaaatagaagctttcattaatgacagagcgagactagcactcaggttgtctgacctcctggctagtccagggctcttttcactaacacttgaagcttccatctgggcagggttgaggaggagaaacggaagagataacctttgtaagattgtgctggatctgtgcttctgaaatgattttatttctcttctcattagtcttctgctcccacgtcacaagaacctgcatatacattatattcattaattcagccttccaggaaggtgagcctcttcccgtggtggtggtggggtgttgttgatgtagatgtgtattttgcatgtgtttgcagtgagagtgtgtgtgcacatcctggcaagttgttctttattgtgtgtatctgagtagcttctgttaaatgactgtatttaaatgtcaatgggccaatgagaaatgccttactggttctgtctggagaaaaataacagcttctagactaagagaacagtagactagatgagtttttgggagtttctgtgggaggtaaaggacagtcagagacagaaaggaggtgctttgcacagagagactacggggtacttagtaggtcagctgaggctatggtgagagatactggaggggtttgcaaggcagggcatattgcctggagctggaggagtagactggatctagagagacacaatcttgaccttcagagaccagagaaaggtcctggccagtcagtcacctgctggtggaggcctctggactgaggcaacccatccttttgcactgaaatccttctccaagctgagttcgtagctctcttgtgtacttggaaacagagttgggtatcctggtacacatggtcattgtttttctcttgtatggaaggggatgggaagagtggtgttcccaaggctggagccacagtgtgaagccagaaagccttaacatggtagtatgggaatttgggagtccacacaactgtggaagtccatgcaggtcagggaccacaggtttgaaggggtttaggacagattttcagacttttcattcaacctccttccaataagccattcaacctacttggatcccatcgtgagagagatttgtttttaattatatgctacaatataaggccatatagatgttcacaggcaccatgttcacctgctttggtgtatgtaaactctatatgctactgaatgtgcctctgaattctagtgtccttgggttggcaattatttatatgcctggattgtttacattaagggtgtgtgtatgcatgcgttgaagagatacatggtttggggcagtatttgcattaggattgcctgagggatatgtgtgtatgtgtatgtgtatgtgtatgtgtatgtgtgtgtgctctgggaatgtgtgtgtgtatatatatacacaaatatgtatatatatgtgtgtgtgtatatatatatatatatacacacacacacacatatgtgtatgggttttaggtgtatgtgggtatggaacagcaaattctgattttggttcagaaatatcatattataggcaaatactgtatatattgtgtcttccctggagaccataaacaccattgttttgctcctagggtgacagattctattcattttctggctgagagtgcctcagaatttttctgggccctgagtctcttttgggacctctcacatcacttaggagtgggagagcacttatctcgaagttaagtattctttaccttctgaatttctagtctggatccaggaagaggaaccacagcccttccttcaatagcactatctatgaagtggtaagattctggaactcctcaatgggtttactgtctgttgcatagccctgaaatctagccatgaaagggtacacttaggaaaagatcattcacacagtctcagagttgtagggaatttagagatcttctaatgcaagtctttgttttagagatgaagacactgaagcccaaggagagtgagggtctgacccaagatcatattgcgtgtttagatatgatacttactgggcagcttgggttttaaattagggccgtccccgagctagttcccaggctgtgggccacaaactggacatctctcctttccaagagtgttcggaggaggggtcagagaggggaagataaaggactctaaatgattttctaaaattagcaagtctttgggagccattccaggacataggtgagcttaatcttcttcaggggtcaacactgttcagagatgaccactgagcctggtggttgaattgattcccatcagagcatttagggactggaaaggagggactcaacatttcttgggggtttattatggataaggtagcctgccagtgtcttcacatggattattttatttagtcctcacagaatgctacaagataggtataattatactttccatttatactcagagaaattaaggcatggagagcatcccccaacctcccccactacccattagcctcatactacacctgagcctccccacctgtggtccaataaagatgctgccattggtcagaagggagggatgggtggctgcctgctggaattcctggcacttcagctatcacccaacattaaagccaactggacaacccagggtcatagagggcactgtgtagacccaggtagcttgtgaggtcatgaaaaagcatatgtggttaagagagtactggaattggagccagaagaactagattcaagtccctcctgcacttcacactagtcgtggatcctgagtaatttgttttgtcactctgagcttcattttttaaatctgtaaaatggggatggcaagtcatacctcacaggattgtgataaggacctcccagtgcaagggtctgaagtttctccttttcttttgcagattggaaagagtcaacctaaagcccagaaccctgctcgattgagccgcaaagagctggagaactttgatgtttattcctagttgctgcagcaattctcacctttcttgcacatcagcatctgctttgggaattggcacagtggatgacggcacaggagtctctatagaacagttcctagtctggagaggatatggaaatttgttcttgttctatattttgttttgaaaatgatgtctaacaaccatgataagagcaaggctgttaaataatatcttccaatttacagatcagacatgaatgggtggaggggttaggttgttcacaaaaggccacattccaagtatttgtaatctagaaagtgttatgtaagtgatgttattagcatcgagattccctccacctgattttcaagctgtcacttgtttccttttctcccctctctgggttgactgcatttctagactctcgccggcccaggcccatcttccaaagcaagaggaaggaatgataatggtgactcaggggaagaagaaacagccctcctctgaaagcctggactgtccggctgtgaactggctggcaggttctgcacgtgggtgggggccagggcctgggctttactcaattgcagagaaaaaactttctccctgcatctcatacctttacctctggccagttggccaccagggggagtgggctgaagggagagtagatggtgcaaagcaagcccatctctaagtagaaaaatcacccagagcacatgctgacctgataactggggtgttgagaccagctttgtccatggtatgatgtttgatttatgaagacgcattgttagaaatccatttggcttcttcatagaagtggcttcccagaggaagaggcctctcagaaaccatgttctatttaagttctgagtcctgatgagtgttccccaggatgcacattgaagggagggctcaggcagctgagggctgagaatgaggcagttggaatctagacactatgctgggttccctgagtcgtcaggccagacatttcaacaaggctgtggggagcagggctgtgactctggctgagcccaggaaagcgacaagggtgaactgggagaggacttactcagagaccccaacaggtgatactgcacaaagcctggttcttcaattttcctaccctgtatctaacataggagtttcatataaaacggtgatatcatgcagatgcagtctgaattccttgcctgaattaaatttatgtatcctctcca

SEQ ID NO: 14 - DNA, 5378 bp, Homo sapiens
cccgctcgtctggcccgcccccctcgccctcgcaggcggtccgcgccactgcctctcagtccctgtcctgcgcccgcgcgccccgggagcctacccagcacgcgctccgcgcccactggttccctccagccgccgccgtccagccgagtccccactccggagtcgccgctgccgcggggacatggtcctctgcgttcaggggtaagcgcggctctctgcccccttcccggccaccacgaggggcgcacgggagaacaggggcttcgtgctagctgccgggcattgggagggcttgacgggccagaggtgactgagcgcagacggacctcaggagcaaggctctgtgtggggctgtgacactcccactccccgcccccacacacttacctcaattcccactgtggattgggaaaccgggggctggccggctaaaggaggaactcacagggtgggctcagcctgggttctcattggagcagatggatgctaacggcacggcgtcccccaagatgtggccaacaatcccagatattcttctgggcccagagcactctacgctagcctgcctgctgccctgcctgctagtaaccttggaccagcccctggccccctctgtcctggtgtcccctctcctgccccaggctagcaagtaggctcttcttgggaagccagccgcagatccttgcctttcctcaggctggcacctgatggtctgcaactctcgggaggccctgggtttggcctggtcctgcttggggtacccccacaatcgtctcacaaccctgtctcagcccagtctgggatcccaatgtgagaaggaccttggctcctgcctctcatcttcaaatttcccagacttgaggtaagggacagtggagaggggatgctgataagacagagtcttgacctgagctgagcattcctggccatccactctgtcctgaacctcagcaaccccttcaaccaaagggtctgatgctggccatggtgatgtgacaggagctcaggaagctccaaggagagaggaagaaggtataaatgggtgttctgcactcagggaggactgggtggctgtgcttatcgcaactggcctggtgccaagtgagggagggtggaaggtgaggccaaggaagaggacatggaggtgctgggaagactacttctcccttgctgtctccagcaagttccttcctcctgtctgcattctgggactcctgaatacctgccccaccactgccttccaccccaggagcctccccctgcattccggggtcccatagcctctttcactttttaccctaggtgagcacccccttgtaagctcagggctactgttgggtgtcagggaacaaagttttagactgctgcgctccaaagcgggcacacacatgtacctagaacacaccagccactgtccccaccatgatgatgacacagccatggacacacccctgcccaggtacacactcaccaggagcttgtggtgatcaacacagctattcatacacccagctaccacatcagccccaaaggtgcccacacctacatgtgggatctgaggaccggctaagctatctggacgtggccacccacagaggttccagcctgactggctagccaccaaccatgctcctgggaaggtagctctgggccccagcaagcaggtcatctcaaaatttggcctccagctctccaagagggatttccaagatcccacagtacagccagggtaggtgtggaaaagtttttgtcaggctgtggtgtgccagagttgtgtggccctttctcactgtgagtggtcatagggccatgatttgttagaacctagagggtcacctataacctacacaggagtcaggtctggctcctgccaccagctcctgcctgcgccttcctgcctcacaagcaatactggcgctgtttgcccatgctgtcctctctacctggggtcccttcccccagctccttcctttggcctggaagacacagctcaggagcaagcagaccctgactcccccgtgacacctgcagttttatgactttgcattataattactcttagtgtcatcttccccagccagtctggttctccttgagggcaaggccatggtttcattatggcggtgtcctgaggcccagccagggactagacccagaactaaggcttggagatgtattttgcaaggagtgagggaggagcagctgtcttcctggggaagtagagccagtccctgctgccctcccaaggaggaagccctagtatcaccctgctgggtgggcttcccctaggagaaagctgctactcagattttggtcggctcagttcccccaaccccagccatccaagaatatggtgttactgaacctctcagtgcatgggttggtgggaccctttattgcggaaaagggaaactgaagcccagtgaagagcaagctttgtacaagatcgtagagcctggtagggctggcttgccagggtgggaactggagtgtggattaggtccctgcccttggtgggagctcatactgacaggaggtgagacttgccagtgcctttagaggccactgtccaccccagaccctccactgggagaagcagaggccaggataggctgacttgtatgggtaggggattatttcagtctctaagtcctggccagtgtggacctaggtccctctgagagacactcctatccatggggaggtagcgtgtgacctcaggcagcctaccataatcctggggcttctctggaggaccccacacagatctatcataggataaatctacttgtctgtcgtagatctatctcaactaggaccattcatcagtgggccatttaatcagcccacttcagccaggagggcacaaacatgaagctactttgcactgaatcctatcagtgtggtgagaacattagacatgcctatagggaatgatctgtgtttttggttgatataaaatagagagcaattaattactgtttagtaaatgcagggcagtggaaaagaatctttcaaaagaggatccccacatggaaacaatcaaggtggcttttgtgatgacaagtggggaacgagatactggactaactgagcccatggctgggtagaggggaagctgaggctcatagtgagatgggccagccagaggtcatgaaactagtctggggcataggggggtctctggagatgggggaagcatgggtcctccactcactgctcatccactgccttctagacctcgtcctttgctggctgtggagcggactgggcagcggcccctgtgggccccgtccctggaactgcccaagccagtcatgcagcccttgcctgctggggccttcctcgaggaggtggcagagggtaccccagcccagacagagagtgagccaaaggtgctggacccagaggaggatctgctgtgcatagccaagaccttctcctaccttcgggaatctggtgagtctgaggggggaggcaggccttttcctgagtagtctggtgggagaagcttagttctgcctttgagtctgatttgggaggcatagcccggcccaggagagtctgatgggagaggcacagccctctctagggaagcgtgaagctggaggcactgccttgacttgcactggattggttaccccagctaatttccactatgtcccttggccccctctgcacttgcctaggctggtattggggttccattacggccagcgaggcccgacaacacctgcagaagatgccagaaggcacgttcttagtacgtgacagcacgcaccccagctacctgttcacgctgtcagtgaaaaccactcgtggccccaccaatgtacgcattgagtatgccgactccagcttccgtctggactccaactgcttgtccaggccacgcatcctggcctttccggatgtggtcagccttgtgcagcactatgtggcctcctgcactgctgatacccgaagcgacagccccgatcctgctcccaccccggccctgcctatgcctaaggaggatgcgcctagtgacccagcactgcctgctcctccaccagccactgctgtacacctaaaactggtgcagccctttgtacgcagaagcagtgcccgcagcctgcaacacctgtgccgccttgtcatcaaccgtctggtggccgacgtggactgcctgccactgccccggcgcatggccgactacctccgacagtaccccttccagctctgactgtacggggcaatctgcccaccctcacccagtcgcaccctggaggggacatcagccccagctggacttgggcccccactgtccctcctccaggcatcctggtgcctgcatacctctggcagctggcccaggaagagccagcaagagcaaggcatgggagaggggaggtgtcacacaacttggaggtaaatgcccccaggccgcatgtggcttcattatactgagccatgtgtcagaggatggggagacaggcaggaccttgtctcacctgtgggctgggcccagacctccactcgcttgcctgccctggccacctgaactgtatgggcactctcagccctggtttttcaatccccagggtcgggtaggacccctactggcagccagcctctgtttctgggaggatgacatgcagaggaactgagatcgacagtgactagtgaccccttgttgaggggtaagccaggctaggggactgcacaattatacactatttatttatttattctccttggggttggtgtcaggggcgagccaaccccacctctatgccctgagccctggtagtccagagaccccaactctgccctggcttctctggttcttccctgtggaaagcccatcctgagacatcttgctggaaccaaggcaatcctggatgtcctggtactgacccacccgtctgtgaatgtgtccactctcttctgcccccagccatatttggggaggatggacaactacaataggtaagaaaatgcagccggagcctcagtccccagcagagcctgtgtctcaccccctcacaggacagagctgtatctgcatagagctggtctcactgtggcgcaggccccggggggagtgcctgtgctgtcaggaagagggggtgctggtttgagggccgccactgcagttctgctaggtctgcttcctgcccaggaaggtgcctgcacatgagaggagagaaatacacgtctgataagacttcatgaaataataattatagcaaagaacagtttggtggtcttttctcttccactgatttttctgtaatgacattatacctttattacctctttattttattacctctataataaaatgatacctttcatgtacagagccctcaatggggccgattttcagttgtgta

SEQ ID NO: 15 - DNA, 40524 bp, Homo sapiens
ggcggggcctgcttctcctcagcttcaggcggctgcgacgagccctcaggcgaacctctcggctttcccgcgcggcgccgcctcttgctgcgcctccgcctcctcctctgctccgccaccggcttcctcctcctgagcagtcagcccgcgcgccggccggctccgttatggcgacccgcagccctggcgtcgtggtgagcagctcggcctgccggccctggccggttcaggcccacgcggcaggtggcggccgggccctgaggcgcgggatccgcagtgcgggctcgggcggccgggcccagggaaccccgcaggcgggggcggccagtttcccgggttcggctttacgtcacgcgagggcggcagggaggacggaatggcggggtttggggtgggtccctcctcgggggagccctgggaaaagaggactgcgtgtgggaagagaaggtggaaatggcgttttggttgacatgtgccgcctgcgagcgtgctgcggggaggggccgagggcagattcgggaatgatggcgcggggtgggggcgtgggggctttctcgggagaggcccttccctggaagtttggggtgcgatggtgaggttctcggggcacctctggaggggcctcggcacggaaagcgaccacctgggagggcgtgtggggaccaggttttgcctttagttttgcacacactgtagttcatctttatggagatgctcatggcctcattgaagccccactacagctctggtagcggtaaccatgcgtatttgacacacgaaggaactagggaaaaggcattaggtcatttcaagccgaaattcacatgtgctagaatccagattccatgctgaccgatgccccaggatatagaaaatgagaatctggtccttaccttcaagaacattcttaaccgtaatcagcctctggtatcttagctccaccctcactggttttttcttgtttgttgaaccggccaagctgctggcctccctcctcaaccgttctgatcatgcttgctaaaatagtcaaaaccccggccagttaaatatgctttagcctgctttattatgattatttttgttgttttggcaatgacctggttacctgttgtttctcccactaaaactttttaagggcaggaatcaccgccgtaactctagcacttagcacagtacttggcttgtaagaggtcctcgatgatggtttgttgaatgaatacattaaataattaaccacttgaaccctaagaaagaagcgattctatttcatattaggcattgtaatgacttaaggtaaagagcagtgctattaacggagtctaactgggaatccagcttgtttgggctatttactagttgtgtggctgtgggcaacttacttcacctctctgggcttaagtcattttatgtatatctgaggtgctggctacctcttggagttattgagaggattataagacagtctatgtgaatcagcaacccttgcatggcccctggcggggaacagtaataatagccatcatcatgtttacttacatagtcctaattagtcttcaaaacagccctgtagcaatggtatgattattaccattttacagatgaggaacctttgaagcctcagagaggctaacagacataccctaggtcatacagttattaagagaaggagctctgtctcgaacctagctctctctctctcgagtaataccagttaaaaaataggctacaaataggtactcaaaaaaatggtagtggctgttgtttttattcagttgctgaggaaaaaatgttgatttttcatctctaaacatcaacttacttaattctgccaatttcttttttttgagacagggtctcactctgtcacctaggatggagtgcagtggcacaatcactgctcactgcagcctcgacttcccgggctcgggtgattctccccaggctcaggggattctcccacttcagcctcccaagtagctgggactacaggtgcgcaccaccatccctggctaatatttgtactttattttatttatttatttatttattttttgagatggagtttcgctcttgttgcccgggctggagtacagtggcatgatctcggctcagtgcaacctctgcctcccgggttcaagcgattctcctacctcatccccctgagtagctgggattacaggcgcctgccaccatgcctggctaattttttgtatttttaatagagacgaggtttcaccatgttggccaggctactctcgaactcctgatctcaggtgatccacccgccttggcctcccaaagtgctgggattacaggcgtgagccactgcgcccggcctaatatttgtattttttgtagagatggtgttttgccatgttgtccaggctggtcttgaactcctgagctcaagcgatctgcccgcctctgcttcccaaagtgctgggattacaggcatgagccaccgtgcctggcctaggtagacgcttttagctttggggtgtgatgcctgccccagtatatagtgaatttaattattgctagagctggctgtttgttagttttctttgaacataagatactcattgtttttagtttgcaaatccctcttcctttttaaaaaatttctttcccttaaattgtttgcatgttagcaataacaaatgcttaaatggtgctatgtgctagatactcttctaagccctgttatgtatattaactaattttttaaattacacaaatcagagaggttaagtaacttgcccaagattacccaacaatactaggatttgaacctaagtttgtctcaccccagattctgctcttaatctctaaacttttaagttagtagtgacaatagtaggtatttattgaatacttaactatgttttaggcgttgaagtaaatattttgcaggcattatctaatgtaaacaccctaaagttacataacaggtaccctttaggtaaataaacactagtatgaccttggaggcacagatagttgaagtaacttgcccaatatcacttacatgaaattggccctcaaatgtgtctgatacaacccatgctgcttgtaactatcgttttaaactgccagggtaaacttggacacacttgagctaagaaaaagcttttagatttttgcaaattaatgtgaaagatatgctttatgtggatataatatcttctaaatttcggggatggtagtcctagaaatgtaatcctgccctagccgagcttaccctgccaataattttttacagaattggtaaaacggagcaccttttttttgtccttggccacactgttatcaacagggtgtagattgacatcaatctgtaggtgtaaaccagaattactctttgtgaccaccaggaaatagagcagttcagttcaggggtttctttctgtgaatttagcactgtgacctgcatactacaagtctactttgttttctatccattgtttgtatctgggtattgcaaaaggtaggaaaaggaccaaccagatcagcagagaagagttgccttggagttttcttttagttttctgcagttcattagatagtaactaggccatgtcattttactcccttgtagtgaagatatgttgaagttgtactggtatactcttctacctttctgtaattttatattgtgtagacttgataaaatttatgtgtcaatcaccaccattaatatcaatattgagcctcaattcttatttttctgcccagtggctgccaaattactaacatttacaataattcactactactaagataatctactagttcgatcacatacttcaaattgttatggaactactgtcttcagcattgtgcttctgataactgataagtataattttttttttgtccagagtgaacatgtctattcttccactgtacacactaataaaaggaaaaattgtaatattgggtaaattcatgtccttacacatgtagtagttatgagcccatgtccctagaatgagtaataatttatccctcccttggttgaatagtcaagaatgctgattttaattcttctaacagctttatccctcagaagggaaggcaagcaagttatatatgtagtttatttgtaagactgatatgaaattggaagatgaatctactattagctttaattatttttacatttaggaatattgcatcagtaactcataattttggttttctgttatcctgagttaacacaaattatccaaggagatggcggatcatctgctttgaggtgtttttttttgagaattttaatgtatctgaatataaaaggtaaaaatatgccaactagcaatttctgcccattccagaagtttggaaatattactcattactaggaattaaataaaatatggtttatctattgttatacctcttttaattcacatagctcatttttatcttttatttttgtttgttttttttgagatggagtcttgctctgtcaccaggcaggagtgcagtgatgcaatctcggctcactctagccaccgactccctggttcaagcgattctcctgcctgagccttctgagtagctgggattacaggcaggcaccaccacgcccagctaatttttgtagagacaggatttcaccgtgttggccaggatggtctccatctcctgacctcatgatctgcctgcttcggcctcccaaagtgctgggattacaggtgggagccactacgcctggcccacatagctcatttttagactcacttccattaagtcttgtttggacccacgaacattgtctttttttttttaagatggagtttcacttttgttgcccagactgtagtgcaatggtgcaatctcagctcactgcaatctctgcctcctgggttctagcaattctcctgcctcagcctcccgagtagctggaattacaggcgcccgccaccacgcccagctaatttttgtgtttttagtagagacggggtttcaccatgttgggcaggccaggggtgatccgcccacctcagcctcccaaagtgctgggattacaggtgtgagccaccgcatctggccaacatgtcttttttttttttttcctttttaaccacaaagagacttaagcagtccttgtcacagatgatgaattgatgttgcaagtattgtcttagcttggattaattttcttgcttactgtaattttagataatatagctttgtaattagagattttatgtgtaaaccacaaaaatgtttacatgaaggccattattacagatgtgacgtgcataattattagtaatttgtatgtttacatgggtcagtctggcaaaaaattatgaagttttaaaaattaaaaaaaattataatgccagttttactggaaagtaaaattatttcagtaatcgattatagcaaaagtattgattttcattccagacaaaagtcagaatgaaaggtaatttctcaatactctttcagattaataaaagtacctgtagcgatttttatcattcacaagtatatcacaagtaagttagaatttgagaactgtgttctagatctctgaggagatgcagtcagatttctgaactgtctcagcaaatggtaagtaacttagagctagtaattaataacctgtcctttgatttctgattcagccaagaatggccatatttgggaaaggcagatctggagagtaaccacgttttcattcatttaccacttctaggcccctccagagctctcagatattttggggttgagcccttccccaaagccatacaggaccttttttttgtgatctgttctagccatttttatgttgggtgcttgttatggactgagcatttatgtcctcccacaccccccccataccttttttgaagtcctaacccccagtgtgatggtatttggagacagggcctttggaaggtaattacagttagaagaagtcgggagggttgggcccaggtctgattggattagtgcccttatatgaaaagacaccaggacgggcgcagtggctcacacctgtaatcccagcactttgggaggccaaggtgggtggatcacgaggtcaggagtttgagaccagcctggccaatgtagtgaaacaccatctctactaaaaatacaaaaattagctgggtgtggtagcgggctcctgtcatccaagctactcgggagggtgaggcatgagaatcacttgaacccgggagttggaggttgcagtgagcccagattgtgccactgtactccagcctgggtgacagagtgagactctgtctcaaaaaagaaaaaaaaaaaaaaagagacaccagagagcttgttagaagaggtcatgtgagcacacagttagaagaccttcaagccaaagaagaggcctgagattgaaacctaccttgcaggtaccttaattttggacttcccagcctccaaaactgtgagaaataagtttctgttaagtcactcagtctgtggtattttgttatggcagcctgagcaggtagttgttctttcagaaggtgttgataataaccacatgcaacaccaagtcacaaataataaaacagatgtaacttatattcatacagaaagttgggcactgccattgccttgttggtttacacggctgtgctagttcagtagcagaaaggtgctggtctcctttactcagtttacaatctaggcagtagaatgtaatcactgctttaaacttgatactgcttagggagagaatcattggtgctgggtaactttgggttctaggtttactttttgtgtatatataactgtttttggtaaatcacaagtttctgggcttgtcgaattagattttgttacagattatgagctttattatgctatacagttagttgtatgtatatatgcctttcccactagattttaagctttttttttttttttttttttgtgacggagtcttgctcttgtcgcccaggctgaagtggagtgcagtggcacaatctcggctcactgcagcctccacctcctaggttcaagcgattctcctgcctcggcctcccaagtaactgggactacaggcacgtgccaccacacccggctaatttttgtattttttgtagagacagggtttcgccatgttggctaggctggtcttgaacttctggcctcaggtgatccacccgcctcagcctcccaaagtgctgggatttacaggcatgagccaccacgcccagctataagctctttaagggttgtaaatttataatcattcttttactctcctgcaaattctgttgcacactgccttaatcaaggtagatgctgaatgcatttttgtataattgaatatgttgcaatccccaactctctccaactgttcctgtcaaagcagccactggattgttaactaatccatattagatggggttaattaatatcagatgggacaagtaagggctaataagattataggccaccaagtagatttctgtctagctcttatagagattgagtttattggacctgtttgataggaagttttggtgtttgggatgattaaaactgaagttcctatttattgaattatacctatttatattatttcatatcagtggtccacatgcaagtgaggcttctgagacagagtttgagttctctcttcaactaccataacacttaacctgtatctttttttttttttttttttttagacggagtctcgctctgtcactcaggctggagtgtagtggtatgatctcggctcactgtaacctctgcctcctggattcaagcagttctccatgtctcagcctccctagtagctgggattacaggcctgtgccaccatgcctggctaattttttttttgtatttttagtagagacggggttttaccacgttggccaggctggtctcgaactcttgacctcgagcgatcaacttgccttggcctcccaaagtgctgggattacaggcatgagccacagcgcccagccgtctttttttttaaatagcaatttaacactgttcacagttactcatgtacatgtcatgccatctattacactgtaagttctgtgagggtagctgtatcaaatttatctaactctctctagtatgcatgacatagtaagtattcaataaatatttgcatattagtgataaggatacaggttctgaatagtgggtccttaccatttaagaattagtatttgatggccgggcggggtggctcacgcctgtaatcccagcactttgggaggctgaggcgggcggatcatgagatcaggagatcgagaccatcctggctaacatggtgaaatcccgtctttacaaaaaaaatacaaaagaattaaccaagtgtggtggtgggtgcctgtagtcccagctactgctttgtgaggctgaggcaggcagatcacctgaggtgggaaattcaagaccagcctgaccaacatggagaaaccccatctctactaaaaatacaaaattagccgggcgtggtggcgcatgtctgtaatcccagctactcgggaggctgaggcaggagaatggcgtgaacccgggaggcggagcttgcagtgagccaggatcgcgccactgcactccagcctgggcgacagagcgagactccgtctcaaaaaaaaaaaaaaaaaaaaaattagtatttgatatttgatcattaaatatgaattaagaggacttagactttttgttaaatgtcaagctgggaaaagttgtcatttaaatgaattgcctcttatttaatttcgtctgatgatacattttgtttttattttgtaaaaaattattttttttctttttggagacagggtcttgctctgttgcccaggctggtcacaaactcctgacctcaagcaatcctcctgccttagcctcccaaaatgctgggattacaggcgtgagccacctcgcccggccttgtattatgatacattttgaacaactacaagtagacttggtataatgaacctgcacgtacccattgccaagttctgacaactgtctgtctatagccaattatgcatttcttaaattagaacccccccaatatacccaaatatatatatatgtgtgcatatatatagtaagttgtaacaaagttgtgaattcatacctgaagtatctcaagtgatgcaagttttatgaatttttgtttatgccttttgggaagagttgtattgacaaattttttatgcttaaagtaaaccataaatcaaaaaaataaaatctaggatgcaataaaacaaaacaacttcttgacataagtatggtatgtaaatctgttttgattggaaatcaatttgttatattgccagaattcctgttttagaatacatctctgctgatctgtctgtattcttagactgcatatctgggatgaactctgggcagaattcacatgggcttcctttgaaataaacaagacttttcaaattcttagtcgatctgcagaacctgtagccaggcactgaaccattttgatagatgcagtaatcgttgcaagtgtatatttcaaggagttctggctgggtcctagtttatgcttgtggcagaagcagtgagtaactgggaggaagttggtgagtaagcttcaaggaagaagtcatttttagtactctggatcttcctgattttaaagcactacaaaatggtgcattttcattcttgtcaagtgataacagatatattctgatgagcctgaaatgaatatatattgtatcatttttataatatctagcaaggtttgtattttcctagaacttgaactaaatttcagttcataaaatttataaaatacttagttgttgtaaaatatttttggaatgttcacataggtgacacacaaatgtcccattttcattctttctatagtaaatatgttctgatatgtgaaggtttagcagatgcatcagcatttaatcctagaggatctggcataatcttttcccccaagaatagaaattttttctgcttatgaaagtagtacatgtttctttaaaaacaaatcaatattgacttctgcctgctgtatagcactatgcctccacctggccatgaccaggggcatgtcctggtccacctacctgaaaatgtttgcaaccagcctcctggccatgtgcacaggggctgaagttgtcccacaggtattacgggccaacctgacaatacatgaagttccaccaaagtctgagaactcagaactgagctttggggactgaaagacagcacaaacctcaaatttctcagcactggaaacctcaaaatataactgaattccataaataagattttaagtcttaaatatgtatttttaaatgtattaaaagtcaagctgcttgtatttaagcacctaatacaatgcttaggttgtaaaaggagatgctcaataggtactaactgatatattgagatttaattatggtttgaccaatatttattggaaaccgccaaagcttaaatcatcagcttcttgaatgtgatttgaaaggtaatttagtattgaatagcatgtgagctagagtatttcattctttctggtttatttcttcaaatagactttgaatataatggtgaatgggtattataaattaactaataaaaatgacattgaaaatgaaaaaatatatatattaaagtgtagaaagtgaccaggcgtggtggctcacacctgtaatccaagcaccttgggaggctgaggcaggaggatctcttgatcccaggagttcaagaccagcctgggcaacatagcgagacttcgtctctaaaaaaaaaaaagagagagaaaaaaattttttttatttaaaaaaagtgtagaaagtgtcaagaccccacttcttaccattatttggtatatttctctatacccacccacccttcctccttactccctccctcccttcccaatctttttatctttttgtattctgattttttgtttgtatattttgctttaatttaatgtatcctttaaaaatttcccatacattttatatgtatatataaaaacgcatgctgccaaagataatttataagaaagaccattgaatttttttaaaagtgatatatattcattgaaaaaaatttagaatatatagcaaagcaataaagaactaaataaaattgctgtaactcctctttcaaagataagtgcttttatgattttgttgtatttttttctgtatataggtacatatatagtatttataaagctgtactcatagtacattttcacatcacaggtaccatatcagtgttattaaatattttgtatgccaggggctagacataccaagacaaccaatatgtggttctacttaaataatattagagtatcttttatgatgacacttcatgagttgactataataatcttagacttctaagagtttgggttttcaaaagatcacttagcttttttgggtgatttttcccccttactgtgagatgagagaggctgtttggatttgggattggggtagcggggacagcaacttttcttttctttttcttttttattttgaggtagggtattgctgtgtcacccaggctggagtgcagtggtgtgatctcggctcactgcaacctccacctcccgggctcaggtgatcctcctgcttcagcctccccagtaactgggactacaggcgcgtgccacatgcctggctaattttgtatttttagtagagatggggtttcaccatgttggccaggctggtctctaactcctgacctcaggtgatacgcccacctgggcctcccaaaatactgggattacaggcatgagccgctgcatcagccagcagtttttcttgtggttttttttgtttgttttgttttgttttgtttttgagatagggtcttactctgttgtccacgctggagtgctgtggtatgatcgtagctcactgcagcctcaaactcctgggctcaagtgattccttctgcctccgcctcccgagtagctgggactacaggtatgcaccaccatacctggcaaatttttacaaagttttttgtagggacggggtcttgctacattccccatgtcggtcttgaactcctggcctcaagcaactctcctgtctcagcctcccaaagcactgggattacaagtgtgagccaccacaccatgccagtttttcctgttcagtgtgatattttatcttgttagactacagtgtgttaaaacttgttttactaaattttcaaacatactcaaaagtggagagaatagtataatgaatacccgtatgttcatcacccatgtttagaatattattaaatataaagattttgctgcgtttgtcttagctctttaaaatttttctttttctctttgtgacctaaaggaaattccatatcttatcactttacttctacattcttgactaagatgactaagacatatagttacatggttttttgttttgttttttgttttttaaagacgaaatctcgctcttgtcccccaggctggagtgcaatggtgccatctcagctcagtgcaacctctgccttctgggtacaagcgattctcctgcctcagcctcccaagtagctgggattacaggctcctgccaccacgcctggctaatttttgtatttttagtagagacggcggggggaggtttcaccatgttgacaaggctggtctggaactcctgacctcaggtgatccacccgcctcggcctcccaaagtgctgggattacaggcgtgagccaccgcgcccagcctgtttttttgtttgtttgttttgttttttttgagacagagtcttgctctgtttcccaggctggagtgaagtggcgcattcttggctcactgcaaccttcacctcccaggttcaagtgattctcctgcctcagcctcccaagtagctgggactacaggcatgtgtcaccacacccggctaatttttttgtatttttagtagagacgggatttcaccgtgttgcccaggctggtctcgaactcctgagctcaggcagtctgcctgcctcagcctcccaaagtgctgggattacacgtgtgaaccaacccgcccggcctgttgttttcttacataattcattatcatacctacaaagttaacagttactaatatcatcttacacctaaatttctctgatagactaaggttattttttaacatcttaatccaatcaaatgtttgtatcctgtaatgctctcattgaaacagctatatttctttttcagattagtgatgatgaaccaggttatgaccttgatttattttgcatacctaatcattatgctgaggatttggaaagggtgtttattcctcatggactaattatggacaggtaagtaagatcttaaaatgaggttttttactttttcttgtgttaatttcaaacatcagcagctgttctgagtacttgctatttgaacataaactaggccaacttattaaataactgatgctttctaaaatcttctttattaaaaataaaagaggagggccttactaattacttagtatcagttgtggtatagtgggactctgtagggaccagaacaaagtaaacattgaagggagatggaagaaggaactctagccagagtcttgcatttctcagtcctaaacagggtaatggactggggctgaatcacatgaaggcaaggtcagatttttattattatgcacatctagcttgaaaattttctgttaagtcaattacagtgaaaaaccttacctggtattgaatgcttgcattgtatgtctggctattctgtgtttttattttaaaattataatatcaaaatatttgtgttataaaatattctaactatggaggccataaacaagaagactaaagttctctcctttcagccttctgtacacatttcttctcaagcactggctatgcatgtatactatatgcaaaagtacatatatacatttatattttaacgtatgagtatagttttaaatgttattggacacttttaatattagtgtgtctagagctatctaatatattttaaaggttgcatagcattctgtcttatggagataccataactgatttaaccagtccactattgatagacactattttgttcttaccgactgtactagaagaaacattcttttacatgtttggtacttgttcagctttattcaagtggaatttctgggtcaaggggaaagagtttattgaatattttggtattgccaaattttcctctaagaagttgaatcattttatactcctgatgttatatgagagtacctttctcttcacaatttgtctcttttttttttttttttgagacaaggtctctgttgcccaggctggggtgcagtgcagcagaatgatcacagttcactgcagtctcaacctcctgggttcaagcgatccttccacctcagcctcctgagtagctgggactataggtgtgcgccaccactcccagctaatatttttattttgtagaaacagggttcgccatgttacccagcctcccaaagtgctgggattacaggcatgagccactggcccagtttctacagtctctcttaatattgtatattatccaagaaatttcatttaatcagaacctgccagtctgataggtgaaaatggtatcttgtttttatttgcatttaaaaaaaattatgatagtggtatgcttggtttttttgaaggtatcaaattttttaccttatgaaacatgagggcaaaggatgtgttacgtggaagatttaaaaaaaatttttaatgcatttttttgagacaaggtcttgctctattgtccaggctggagtgcagtggcacaatcacagttcactccagcctcaacatcctgcactaaagtgattttcccacctcacctctcaagtagctgggactacaggtacatgctaccatgcctggctaatttttttttttttgcaggcatggggtctcactgtattgcccaggttggtgtggaagtttaatgactaagaggtgtttgttataaagtttaatgtatgaaactttctattaaattcctgattttatttctgtaggactgaacgtcttgctcgagatgtgatgaaggagatgggaggccatcacattgtagccctctgtgtgctcaaggggggctataaattctttgctgacctgctggattacatcaaagcactgaatagaaatagtgatagatccattcctatgactgtagattttatcagactgaagagctattgtgtgagtatatttaatatatgattctttttagtggcaacagtaggttttcttatattttctttgaatctctgcaaaccatacttgctttcatttcacttggttacagtgagatttttctaacatattcactagtactttacatcaaagccaatactgtttttttaaaactagtcaccttggaggatatatacttattttacaggtgtgtgtggttttttaaataaactccttttaggaattgctgttgggacttgggatacttttttcactatacatactggtgacagataccctctcttgagctacatcggtttgtggggagtcaaaagtcctttggagctaggtttgacaaataaggtgggttaacacttgtttcctagaaagcacatggagagctagagtattggcgaattgaagaaatccccctttttttttaacacacttaagaaaggggactgcaggtatactcaagagagtaagtcgcaccagaaaccacttttgatccacagtctgcctgtgtcacacaattgaaatgcatcacaacattgacactgtggatgaaacaaaatcagtgtgaattttagtagtgaatttcattcataatttgatcgtgcaaacgtttgatttttattactttagactattgtttctgattttatgttgggttggtatttcctgtgagttactgttttcctttaaaataggaatttttcatactcttcaaagattagaacaaatgtccagtttttgctgtttcatgaatgagtcctgtccatctttgtagaaactcgccttatgttcacatttttattgagaataagaccacttatctacatttaactatcaacctcatcctctccattaatcatctattttagtgacccaagtttttgaccttttccatgtttacatcaatcctgtaggtgattgggcagccatttaagtattattatagacattttcactatcccattaaaaccctttatgcccatacatcataacactacttcctacccataagctccttttaacttgttaaagtcttgcttgaattaaagacttgtttaaacacaaaatttagacttttactcaacaaaagtgattgattgattgattgattgattgatggtttacagtaggacttcattctagtcattatagctgctggcagtataactggccagcctttaatacattgctgcttagagtcaaagcatgtacttagagttggtatgatttatctttttggtcttctatagcctccttccccatccccatcagtcttaatcagtcttgttacgttatgactaatctttggggatttgtgcagaatgttattttagataagcaaaaacgagcaaaataggggagtttaactttaatattttcttttaaaaagcatttcatgttataagatcaattctgagtggtagaaatgctttgacattttatttccattttctacttttagtttttttcctatttgtttaagatcttagaggattattaagctgaactcctcaactgataaaaagcatgacatcttaaacataagcaaagcatatttttaggttaattttcacatagaaaacagtttattttatgtgaaattctatgtagatatactatttttttggtatttattgatatgtttattttattttattttattttattttattttattttattttatttatttatttttttttttgagacagagtctcactctgttgcccaggctggagtgcagtggcatgatcgtagctcactgcaacctccacctcccgggttcaagcaattcttctgtctcagcctcccgagtagctgggactacaggtgcctgccactatgcccggctaatttttgtgtttttagtagagatggggtttcaccttgttggtcaggctggtctcgaacccctgacctcaggtgatccacccacctcagcctcccaaagtgctgggattataggcatgagccaccgtgcccggccgacatgttaattttttaaaaaaggctttactggggtatattttatataatataataatcacatgttttaactatacaattccaagctttttagtatatttatagggctatgcaaggaagatatactgttaaacagtagaaattgagaaagctcttctgataatatctcttgatttgatgatggctcatgcctgtaatctcagtgctttggaaggccaagacagcagaatcacttgaggccaggggttcgagaccagcctgggcaacacagcaataccctatctttacaaataataaaaatatctgttgatttgaagtaaagtttttttttaaagacaaggtctcattctgtcacccaggctggaatgcagtagcaagatcacagctcactgtggccttgaccttctgggctcaagtgattctcccacttcggcctcccgagtagctgggactaacaggtgtgcaccaccatggctggctaatttttttttatgtttgtagagattgggtcttactgtgttgcccaggctgatcccgaactcctgggctcaagcagtcttcctgcctcagcctctaaaattgctgggattacaggcttgagtcaccatgcccagcctgaagtagcatttctaccctgtttaataattcagcagcttgtcatgtaagatattcatatatgcatataaaacattaggcagcttaatttggtaaaactgtaaaatggaaattttaaattgtttgcagcatcaataacattgatgtcagtatgatttttacatgctgatcttgaccaatttgaaacagtgagttaaaatctggctgatccgtactaatcctaaagaaatattctatgaactattaaatgtttccagaatatataaagaaacattatgatgtcaacacacccatctatttttttttggaaataaaaactccatttttcttattaaagaaaacatgcttattagaaaacatacggctgggtgcagtggcacacatgtaattccagtgctttgggagatcgaggtgggagaatcacttgaggccaggagtttgagaccagcctagacaacataatgagaccccctctctacacaaaaagaattagttgtgcatggtggcgtgcacctgtagtcccagctacttgggaggcagaggcaggagcatcccttgagcctaggagtttgagactgcaggagttcgagactgagtggaatgcagtggaactgcattccagcctgagtgacagagggagaccctgtcttaaaaaaataagaaagaaaacacaactgcagaaaattataaaggatttaagtcattccaaatatcactgccactttttatttagaatattctaaagaattctctctctgtgtacacacacacatatgcgtactcttaatccaagtagcttggtaggattttatttacctagtgcctagatgggaaattgcctggggattccaaatacctatttcattaaattaaagatgtcactgattttaagacttaacactatttttcatactgccaagaaagaaaacactaccagttataaatgtaaattgccatcaattgtaatacatcaattttagagctattattaataaaatgtgaatgtgcatcttagagcaatgaaatatagtactatatatttgatgaccttttctgccctgtgatattcagaaagtgaaagttaaatatgggctgagcatggtggctcacacctgtaatcccagtactttgggaagtcaagacgggaggctggcttgaacccaggagttcaagaccagcctaggcaatgtagcgagacgccatctcaaaatattaaaaataagtaaataagtaaataaaaagaaggttaagtatacaaatgtatttcctttgttgtgaatttatttcaattttatagtgattttttttttttgagacgaagtctcactcttgtcccccaggctggagtgcgatggcgtgatctcagctcactgcaacctctgcctcccaggttcaagctatactcctgccttggccccccgagtagctgggattacaggcgcctgctaccatgcctggctaatttttgtatttttagttgagatggggtttcaccatgttggccaggctggtctagaactcttgacctctggtgatccacccgcctcggactcccaaaatgctgggattacaggcgtgagccaccgtgcctggccagtggttttttgttgttgttgttgttgttgttttgtttttgtttttgtttttgttttgagacaggatcttgctctgtcacccaggctggagtgcagtggtgccatcttggttcactgcaacctctgcgtgggctcaagcaatcctcccacctccctttccagagtagcggggaccacaggtgtgtgccaccacacctgactaatttttgcatttttttttgtagaaacagggttttgccatgttgcccaggttggtctgaaactcctgagctcaaacaatccaactgccttggcttccctaagtgaaattacaggcatgggccactgtacccagtctagtgatttttttatttttatttttattttattttattttatttttttaccaaaaaaacaacaaagcctcaggaggaaaagttgatacacaagtaaattttattggaaatgtttttgtgtggaccttaagcagagggaaaattagtctgcattatggtgtatccagactaaatgactgatattaaaatgaaattattcttaggatttgcaatcttagagaaaactttttcatttttatttttttgagttacaaattatcttcatttacatttgagaacagtgagtcacagagggattaagtaacttactcaagatcatacaagtctttgatttgaacccaatcttttaactctgcagaactcagagtcactcttatttggaaaaactttttaactgatgtggatcctctaatatgggcttcctattattcattctctattagtcagaagttttgcaagcagacagaattcattttgccaattacgggattttccctcagttgcagtcaaggttcataaaactataactctttatctttaattagaaatgtttttttttttgagacaaggtcttgctctgttgcccagactggaatgcagtggcatagtggcccattgcagctttgaactcctgggctcaagggatcctctgcctcagcctcccaagtatctgagactacaagtgcgtgccatcacccatggctattttaaaaaaaaaaaaaattgtagagatagggtcttgctgtgttgcccaggctggtctcaaactcctggtctcaagcaatccttctgccttggtctcccaaagtgctgagattacaggtgtcagccgttgcacctggccaaaacgataacttaaaatacacacacacacacacacacacaaacacatatgtgtatttgtgtgtgtgtgtgtgtgtgtgtgtctcaaaaggtatcaaaagagaatagctataactttagtgttgatcttgatagtgacttgattaggctctgtttaacatcaaagatgcaaattaatactttctttgaacatattaaaaatgcagaaaatattggagtattttattttaaataaattgtattctgtatatttaaggtatacaacatgatgttatgggatacatataggtggttaaaagattactgcagtgaagcaaattaacgtatccctcaactcacatagttacccattttttttttgttttggtggcaagaggagcttaaaatctcatttagtgtgaatcccaaatacagcacaattttattacctatatacttcatgttgtacattatatttctagacttgttcatcctacatatctgctactttgtatcctctgagctacatctccccattttctcacttgccccccaagtagtttcttaaagtgtctcatgtaagagggcagtagctttcagcttaaactttttctctgtatgtagtcgatttctttgaggtatacttttctctccagaatagttagatgtaggtataccactttgatgttgacactagtttacctagaacttatcttctgtaaatctgtctctatttccatctctgtctccatctttgtctctatctctatctgtctatctctatctatctatctatctatctatctatctatctatctatctatctatctatctaaagcaaattcatgcccttctcctatttattgaatcgagaccatagacaggggtgagagaaagaatttggcaggaatggggatgtgtattatctgtggcataaggaaactttacagaactaggttcaaaagtatactttctagttctttcccatggcttttcactttgatgtagtccttatcaggtaactgaggttttatataagtcccctgattcttagaacatgaaggtgtagtagtcaaggttggtcccttgaaaccacaaattttgtgaaaaaaaattaagaaaattgaataatttcctcagcaaatacatattgatcatctgttatacagccatgagaagtggttctgttgcacacgtttattttatcagatcctaatcccaaaccaggcataaaatggaaaccatgaagataggatgaaataacttctgaatgtttgaatgtttgaaaatagtgtacttaaaaataccaggtggtttttgtttgttttttgtttttttctttttttgagacagggtctcactctgtcacccaggctggagtgtagtggtgcaatctcatctcattgcagtcttgacctcccaggctcaggttatctcccacctcagcctcccaagtagctgggactacaggcacatgccaccacgcccagctaattttttgtattttttgtagagacggggtttcaccctgttgcccaggctggtctagaactcctgggcttaagcgatcctcccacctcagcctcccaaagtgctaggattacaggcatgagccaccatgcctggcagaaaataccaggtttttaagtatcagcacttactcttcaatcttttctattactatgttgtgctaaatggtattttttatttaattagagcaatgctgttcaatagaactttctttgaggatggaaatcttttatgtttctgctatgtggtacagagccactagtgacatgtggcttttgagcgcttgacacatcttgtgcaacacaggaactgaatttttaagtaatttatattgccacatgtggctaccgtatgggacagtgtagtactagatgatctgtaagggctgtgcttcatcagtgtcgttttttaactgacaaaaacctttagttttttttttagtaatgtgtttatttaaaagaattcataaaatacaagtaaacaaattaacttgttacctgagcatatgtcctttcatacttattttttctgcatacatattttggaaaatggaatatctgccctttttttttatctgagatacagtctacctctaaaaatacatgattctaacattctcacttttgttggcatttgatcagggtatagaaaaacagttaaaaggacagagaatggttgagagattatgatatgaagagaaaatgtgattgagtgtggtagacttggggcctgcttgaatgttgagagaatgactgttttccgataaaaaaaaaaagtccattctaggatcctaaaagaagggtctgaagttcactgcagaaagcaagctacatagtactaagccactaaggggacatggagcccttagtaattcctaccttagtaatagtctcatcatgccctcttgggaacccagccttgttgattagcctctctgctttctctccttatagttcaacctccctgtttgttccaagcagttcttttcctgcccatttattatgcatttctatacagctttcctcctctttttctataccatgctgcagttcttattgctacctagaggttttcaaaattcctaggggcggataagtaggcataaacaaagttcttccctattatccttcctattttttcacctagactgaagaggtagacaaaatagaaataaagacattaagggtatgtgtttgtagtcccaaagagcttctctggcaattttatgtagttgacagtgacgctctgagttcaggacagattggactccttggctgagaggagtgaggagataggacggtagaggagagggtagagcaactctggaggaagctttcccctcacctttgccagtcctgttatcctagacttaaccataattaaagatgagggaggcactcagtaaagggatctagtgggaagcttgttccagacagccaaggagggaggttcgcgcagttcctttggccacccaggtggggtaattgatccatgtatgccattcatgtacaatgtaggcacttatacctgtattccaatgtagtgaactataccattactcttaaattaatattctttattagcttccatggtggctataggccaggcaagagagttaagaaaaaataaatagccaggtatggtgactcaagcctgtaatctcggcactttaggaggccgaggcaggaggatcgcttgagtccaggagttcaagaccagcctgagcaaaatagtgagatcctgtctctattttttaaaaaagccttggggcaaacaggagtatggaggtttggatgctaatagaacagcagtgtcttactgcttggagttctcttgtttcttgtcctatcaccgtagcctttggatcacagcaatttttccatgactccatacttttcagttcttgaatattttttcctttattcctcttgtctctgtaaagacatcaactggagttggactgtaataccaggtatctccagaagatggcactatttaacagattttataaataatttgatgtgagtcactgtcatctgaagcttgttgccttttctttctttcttctttcttttttttccccatcaattctgtatgtttgaaatgctgggttttaagttagttagaataagggatgtctgtaatttccctaaattgagaagtaatatgcaaaggttgatatcagaagtcatatgctcaccttgcaacaccaaataatactggcccatttgtgatttttgaaagtaacactccataataaatggatgtatatatagaagcataacaaaaatagaagcacataaaagtgaaaagtctcataaacgccattgtcactactcatgtaattgctgttacaaatttgtttaaatgttgaataaaaatggtgtcataggcaacacagtgttccactacttggtgtttttaatagcattattctgtctcagtgtgctttggattatcaggtgctttttaatagttgcatggtattacattgtgtagatgaacttgattaatttaaatggttccctgttaatggacatgttggtttgtttttgtgaacaactgatacagtgaacatttattttttaaataaaaaaaagagagacagggtcttgctgtgtttctcgggctggccttgaactcctggggtcaagcgatcgtcttgcctctgcctccctgggattacaggcatgaagccaccgcacccggcccagtgaacactcttgaatgtatctttgtatacttgtcagtgtttttgtagcattgattcccagaagtgggattactggattaagtgacatgcatgtttgcaattttaacaggtattgctatgtcattttcaaaagaagctatgccaattaatactctcaccaacaagagtgcttatttcccctcagcatattatcaggcttaagttttgccagtatgggtgggagaacagtagaatcacattgttttagtgtttgtttctcagatagatataattttacaccttataaccttctcttctataaattgtctatttgtgttcattctccattttcctatgggttcttattgttggagcccaatatataaaagggggtatttgttacagaacctcttcagttttggttcatgtcatgcctgggtttttaccctttctacggatgttaaaaaaaattctctattttcttccagtccacttatggctttattttttacatttagattttaatccgtctggaatttatttttgtgtatgctgtgaggtagggaccatacttttattttttcccaaatgggttactagttggccaaacatcatttattgaataattcatcttttccctactgactcgaaataccatctttattgtatactaaatcctcatatagttctgggtctgtttctgggctctactttgttcatttactgtgctggtactgcaccgttgtaattgctgtggctttgtggtatggtatggcttgctctctgctagggcaagtcgaagctcttttgttcacctgctctttcacccaaattttctgtcctgaatccagcacagccaaattatggtcattgtcaccaccaactacagtgggtgttgagcatttcccattgaatctcctgtaagggttttattggattctgtgatagcagtaaaatgggagcctaagaggtattccttaaaggactactaatcagacctggtttcccagatgatgctgaagatgacggggcctgggctagacttttgagggacatatccttggggttgggtgtgatatagaccagcccttacaatttgcttgactcatgggaatcgtacagggccagaaccagacacctgtcatgctaataacttccctcacaattcagaaatcactgtgattgaagatgggtggctgttataatactacccacttaaaaatggatgtaacccattttttaggactcttaaaaacatcaaatcagtaatggccgattaggactttttaatttttactaatctctacttgaaagttttctagtcattcatttcaggaaacctaattcttataattcatatcatttagaatatcataatgctatggatattagctagctaacttctcaaatcttctagttctcatttaatttgaagtttgtgtgtgtacataaggatatacatatacatatgtgtgtgtagatatatatatatatagttttttttttttttaactagaatgaccagtcaacaggggacataaaagtaattggtggagatgatctctcaactttaactggaaaggtatgtatcttgaaagggaagaaaaaaaagcacttcataccgagtcaattagtaacagtgtgctttcaatcaatcactaagagataatttacatagtataactaaatgggttatttaacccttggaagcagtctaggttaattatcgttccctaggtcatgtagtaaaaagacagtagaatccaacattaaccttaaatgtccatattgtcaagtactgctgtctgcctctgtgggactctaatttgggatccttcaaaaaacattgatgggggaaaagatagcctttaaaaaaaaaaaaaaaacaaacctatgtgagtctatgtgaggtagactcacatagtttcctaaaagatagcaaagcagtattatgtagtggctgaaagtgtgagttccggagcctgacaactgattcaaagcatggcttagtacttcctaactctgaccttgggcaagttacttaacctctctgtgtcccatatgtgattagggtgaggttgataatagcagccatagagttaagaggattaagtgctataatgcaagtagagctcttacaacagtttctggtaaatcactcaataaattcagacatactattattttaagaaatctcaaagagttttcttgtaccttaaaattctcctagtgtgaaccattggttttggtatattgtgcttccatgtagtttaatatcaagatgtttttagatttcccttttaatttatttgttgacccattggttgttcaggagcatgctgtttacctgaaaataatggagatattaaggtatttgaatatttatcttctagtacattgaaaaactttttgagagtaaccaataataaatgatggaatgctactgctttttttttttgaagctgccagttattgtttacttacactatgccaaatataaaggcattaatctcataaaagtttcacaacaatcctgtgagggagacgatatccccattttacaaatcaggaaattaagacttaataaggttaaaagacttgcccaaagtcacagaaccagtaagtggtagagcttgaatttgaatacagacctgactctaaagctcttttctttctttagattttagtgttcattgcttacttgaatgagtatctataagaaaactttaacatgtaaaacttctgtgaaattatcttgtcccatatcagggtcatgtcaaactaatgtcctcctcagcatctttggaaaacttcagaggagaaatgagctttgcccctcctgttcatttcatataccactgttagacctgtccttccctttcagcatgctttgtccatatttagaagctgttgaagccattacttgtctggtcagtttttagtgctggaatggacctagccttttaggccttctgagatttagtttgatctcgtctttcccacctaatggctctgttctactacatagatttgatctgaaacagttctctgtttctaaaataactttcttttcatgatagtcacagtaaagtacatttattatggaaaaatcaataagtataacgagtgaaagttatttcttggtggtaagattatgggattatttgaactttctgtttcattgtattttatttatttatttatttttgtgatggagtctcactctgctgcccaggctggagtgcagtagtacgatcttggctcactgcaacctccccttcccagttcaagtgattctcctgcctcagactcccaagtagctgggattacaggcgcacgccaccatgcctggctaatttttttatctttagtagagacagggtttcaccatgttgaccaggctgatctccaactcctgatctcaggtatccacctgcctcagcctcccaaagtaccgggattacgggtgtgagccaccctgcctggcctcattttgtcttttgggggtatttttgtgtgcagatatatatgtatataaatatttttccctcttttccccagttagtatttgagcagatgaactttggacccgaatacctgtattcaagtctctaataccacttcttggctattttcattttatcaaatggcctcttatcctcgtttttctcatttattaagtagagatgtaactacttgatataattcaaaaactcaataatggcattcttttgttttttagactctagtgtctgtactcgttgtaccatgctgggattcatttgaacaattgcatggcttttttagtgtattattaaatttgcagtttacttagaatttactgggacctcatacaaatgggaaaaaaacataactgtgttactcatttgctgtgtgcctttggattgaccctattttttgtattcattttctccccatgtcctgagttccactttgaataaaaagtaatttttttcctgcctgtaaaataggctaccaataggctgcagttgtctatagtagctgcttcactgaggagagctcagcatgagagaaatagtatgaattgcttgccacaagttatgggctagccttacttcattctgtacttggacctgtttaggcttctaagagatcttacctccaacaataaactgctttgagacatgaaaaggtggaagctttacttggttataactttacttttaatacctagaacagtgagtcttcaaacttgtatttgcatgcccaatttataaaaagtttcctgagcatttacccctaatatatgcattttaaattatatatgatttatggtaataataatatatatgttacaaaatacatacaaaaatatagattaaacaaggtgaggtaaaaaatttaaaagttctaatctttcttgcaaaccagtggatcttttgtgccttactctggtaaacactgtcttagaagaatatatagaacattaaaatcttaatgctatagttatatgacagagtatgatgagagctacagataaacaacacatcatgaatcttcttgtggcagtgtttataaccattatgtgaaatgctgcctcattcttataactagcataagaacagataggactttctcgattttgaggggtaattattagatggtattttctgttaaggactcttccagctataaaattcttaaatgtagaaagcgaagtgagggtttatggtgagaggaagcattggtatcatgttttagtgtagtccaagaatatggacacatccagaaaatgcagatcaagtttagcctaatgagaaaatatattttggagtccatatggtaaattaaattatgtgatttttgagttattgtacaaatataattcttagaatgttagagtcaggagactataagagaccaactgcttcaagtttcatttaacacatgggaaactaaggccagagaaatttcaagacttgcccaagattagacctcttgttaagtaatgaaagtgttttaaaaacaggtgggtcaaattctgtttttaaaatttccattatgatgaaaatttcagtattacaggcttccaaatcccagcagatgggccacttgtttaaaggagagtttgatataataaagcatctaaaaacaagagtttggataattccttagggttgttatgatgtgatttgacttataattggaaataccgttttattcattgtactgattttcatttctctttttcttctagaatgtcttgattgtggaagtaagttcacatttacttttaatataacatttatgacttttctaacttagtatgcaccatcctaaaggtaagccagggagagaaattcctctgcatcagttttaatggtgggcttgtgttctaaaggagtgagattggttttttgtaaagactacttagtaatttgtttttaccaataatggaatggtatacttcctacctctctttttttagtttgaagtattttctttctaaacataactctctctctctatttatctatatataatatatacatatatatcttatattttatgtatatatatatatatcttgcttagattttgtcttatgtaatatttggtacataaaaaataatatttataatttatagactattttccatgtgttattatgtgctaaagtattttgtatcttagcaccgagaggctaagcagtttcctagggttaccagctagtaaactaagggaaacctttacttcctttagctcagtggttctcaaaatgtggttccctagaccaaaagtattaatatcagacaagaacctaccgaatcaaaatatctgtgatgaggcccagcaagctatgctttaacaagtttccgagtgattctgatgcatgctaaggtttaggatcccttgtttttactcataagtcactttctcattaaggccttccctggccatcctatataaaatctcatgttttcacaccgtcaacttcgtattcctcctcaatacttttattttcctgatcacttatcactaacagcctctctctctctctctctctctctctatgtatatatatatatatatcacttatcactgtctaacagcctctctttatatatatataatctatagattatatatatatgcagcattgtgcaatcattatcacgctcaattttaaaacattttcattgccccacaaagaaacccaatccccttagccatcactccccatttccccttcccccagcacctagcaaactgatcatctacctacttgctgtctataagatttgcctattctggacattttgtataaatagaatcatacaatatgtggccttttgtatctggcttctctcacttaatgttttcaaggttcattcatgttgtggagtatatctgcactcatttcctttttattgccaaattgtatggatagacaggtgttcctcaactgtgtcctgataaacccatctgaagttgaaaatatcataagttgaaaatggatttactactttgataaatctatcctaaagtcagaaaaatctcatgttgaaccatcgtaagttggataccatctgaattacatttttgttatccattcactggttgacagacgttaggttgtttccactgtttgctccttatttctcgtacctgaaatgtccttattccctcccttcttatcccatgtttaagtcatttaagacccagctcaaacgtcacctccacaaaaccttccttgatacccctttcctcttcaattcacttggaccttttgcatttaattttaatttttattttttttaagacagagtctcactctgtcaccaggctggagtgcagtggtatgatctcagctcactaactactctgcctcccaggttcaagcaattctcatgtctcagcctcccaagtagctgggactacaggtgtgcgccaccatgcctggctaattgtgtgtgtgtgtgtgtgtatgtatgtatgtatatatgtgtgtgtgtgtatatatatatatacacacacatatataaatatatatacatatatatatatacacacatatataaatatatatacatatatatatatacacacacacacacatatatatatatatagttttttttttttttaagtagagatggggttttgccatgttggccaggctggtctggcctcaagccatcctcccacctcggcctcgcaaagtgctggtattataggcatgagccactgtgcctggcctgcatttcattttaattataaaatattttgaactcagaaaaaagggtatgctgaatacctacgtacccacaaaagtattaacattttgccatatttgcttctgatcttattttttttgagaaattaaagatcataatacaactaaagccccatttctttcccttcattcccagaagtatgacaattatccttaaagttgatatatatcattcccatgcatgttttttatacttccctagtacaagttagctgtatcctctgctcaggggctcatcaagctgaatcaagggactcatgatcctcttcaaagttccttcaggttgttggcagaatttagttccttgtgattgtaggactgagggcccgttttctcactggctgctggccaggggttgctcccagatatttaaaggctcatgccctagcccatgacagtctcacaacatggcagctgacttcttcaaaaccagcaggagaatcttgctctagtctaccacataacctaatcacaggagcggctatcccgttattttcacagatcctggtcacattcaaggggagggaacccttctgtgtgtgtacaccaggaggcaggaattttttttttctttttcttttttgttaaaaagtcttaaagtcttttatccctaaaggaggcaggaattttgagagccatcagaattctgcctaccacagcccagaaatctgcatttttcacaagtctccagccatgatgtttctgatggctcacactgctttattccatttttaaagagtatttttattgaaaagcattagggttatggtttaaaaaatattttccctaacaaagatgggtttgtttagagtcctacttttgactaaatagctgagattcacttttatgtaaagtcattttatagcgttattaatttgggtgcctttaaaaatagtataaagcatgtttctcgagtgtagtctgttagccacctatattggagagttgggaggagagagtctctatcttgaatttatgggaaaaattctaaaatactttttataatgaaggacaacatcataactccctaataaaatgtgcatgtatatattcaaatttgctgtcattgatcctgcacctacaaaatccagtcctgggggctggcattcttactgcttgctgagggccagatgatatagattccagaatatctccatgtagattttggtgagaattactgtgctgaaaagaatgacagtattgcagttatacatgggggttttggtactttatattgtgactctgaatttaaagctatgcaatgtcttcttttttgaaaggatataattgacactggcaaaacaatgcagactttgctttccttggtcaggcagtataatccaaagatggtcaaggtcgcaaggtatgtatgacattttgacacagaatattttcctcatttgaagggggattaagtgattgcttctttttaaggataaatgttttcaactgtcattttatcttcgaaaagtaatgtaatctcatataagacttaagatataatccttttaaataattttgtcatgtgttaataaagctcataattacagtcacttccttgcctaatattaacatttggtttttcagcatgctaattatatcagtttgtcctgaatagcatggcagaggattttgggcccccttgcaaaattaagaataaggattccaaagcgggtgaggaagtgataggaaggggtgggccctgaagatctggacctcctggaattgagtgatgaatgctgcatcttctttgtgtctgtagtgaaattttataatgcctgcttccttttttattaagtcggcctcacctcctcaccttacctatgctgttttacttttgcttttatagttctacctgtgtttatttctcattttcgtttcatctctcaacaactctggggtggcattattattcccacttttcagataaggttactgaggcatagggaattgtccaaaggtacagagctagtccgctatagagatgagatttgaacccagggaacctggctcacagtttatgcttttgctaccttaagtttttaatagagtgacatcaaacaaacatttaagaatatgtttttcttttccttttataatttcattaaaaacattaagtctctgatcagtctgcagtttttatgtaggggtcaggtaatgttctaacttctgctttttcctaagtgattaacaggtttttataagcccttttgaaaaaatcacggtatctgtcgagcatctttgaatcagagtaagccttctagtgagtcatatgtcagcagtttgactgtatgggcttttctaatatccagttcaagtgtttatcagtgagtttttcttttaaatagatttgggacaggtactatgagagtatataagtgatacgttataggacactaactagtatcctatgaaatggcaaaaactgcaatcacttttgcaccaaccaaatagaaactaatcagtgcacttgcttatttttctacatgctctttagggttttaaatgtcaacctactgtggcatagactttaatcctctgggtattcttttgttgttctttcctggtatatgctgtggaattgagatagactggttcgtgagcgagagattttgtgttgccacaggtaggacatgctcaaacaatacttgggtcatttcttgacccaagtcatctattcaccatagttttgtagcaccgatcttgcatacatttcatgtatcttctttgaaccccacgtcagtgctgcttatatgatactcagaaattaaacactaaggaataagattttcaggtaggattgagttttggagggtcacaaatcttgtaatgtctaatatttccactctccctgctgagaattagttttggcttccttggaggtgatatcgcctctgttgagtataagtggcctactgtgatcacaccactgcactccagcctgggtgacagagtgagaccctgtctcagaaaaaaaaaaaaaaaaaaagaatgcatggcctagatgacttctaaggtttttcccacccagttccagttttcatgttctaggcagagcagtaaagtgagaaacacatggacttgggagtttagtctcgcatttcactgccacttaatctgagcgactattccatatttaatctctctgaatgtatttactcatctttaaaggggaatgattattaacatctttttctcagggaaactatatgagtcaaggagataatatatttgaaaatctttttaactgcaaagcgctgtttcactgttggttataatgtgattgatctcattgtagtgagcagctgcttaattgcgttttagaatgtagggaagatagtaatatttttcacattatatatgtagctggttctggaactgtaaacatactccttttttatggagatctgagtcacgtaccataaaattcactcttttaaagttgtacaatccagtggtttttgatatattcagagttgtgcatctgctaccactatttcattttggaacccaaagaaaccttgtacccattagcagtcattctcccttctcccagcccctggcaactactaatctactttctacagaaagtccgtacagatttgtgtattatggacattccatataaatggactcatgcaatatcctgtcttctttcacttagcatagtgttttcaaggttcatctaggttggggcatgtatcagtacttcatcccttgttttggctgaataatatttcattgtacaaatatatcacattttgcttatccatctgttggtgaacatttgagtttctacctgttggcttttatgaataatgttgatttgaatgtttgtgtacaagtatgaatacctgttttcaggtctcttgagtatatagttgctaggtcatatagtaactctgtgtttaacattttgaggaattgcccgactatttaacaaggtatatgtactgttttacaccagtaacatatgagggttccaatatctccacatccttgacaacacttgttactgtcctttttattgtagccatcctagtggctatgatgtggtatctcattgtggttttgatttgtgtttctctgatgctgatgatgttgaacatgttttcatctgcttattggccatttacatatatcttcttaagaacggttacccatttacagtatggaaaatgcttcagatgcaactctagtcatgccttagagatggagctttattaaacattcagatctctaggcatatgaagtgctgagttctcttgaactcctaatacagattgcactgagtttagtgataccttttctggagcattcctgagttcaggtagggagaagggtttttgctgtgattggcttgttatgttctttctaaatggaaatagaattgaagtgtctcctctctccatttattggaagagtcatgagggacataattagatgatcccttggagtctccggcttaggtcagtggttatctacttaggctgcacattggaatcacctgagagttaaaaaaccaggataacctctgcctgtgtctcatctccagcaattctgatgtaattggtcagggctgtggcccgagtaggtgagttctggttttttaaagctcccaggtgattctgatgtgcaatccaggttgagatcactttgggccctttccagctctttaaacatatatatttatctaggaaggtatgaaagcataagttttcttgagactgcctttaacatctgtaaaggctttcaaagcagcttctgtagttttttttaaatggctgaatatttttcaacaggcagcatttgggttataaaattagcttttggtagagttgacttataccacctccagcttttgttccaaaaataaatactggttcttttggcacactagttgttttaccctaaagttcctctttgtaagccagttattaaaagttgtgatgcagccagggcgaagtggtacacatctgtagtcccagctactcggaaggctgaggggggaggatcgctagagcccaagaagtcaaggctgcagtgaactgtgattacaccactgcactgcagcctgggccacagagcgagactcatctctttaaaaaaaagaatgttgtgaggccgggcgcagtggctcacgcctgtgatcccagcactttgggaggccgaggtggacggatcacctgaggttgggagttcgagaccagcctgaccaacatggagaaaccctgtctctactaaaaaaaatacaaaattagccgggcgtggtggcacatgcctgtagtcccagctactcggcaggctgaggcaggagaatcgcttgaacctgggaggcagaggttgtggtgagttgggcgagccattgcactccagcctgggcaacaagagcaaaactccatctcaaaaaaaagaaaagaaaagaaaagaatgttgtggccaggcgcggtggcttacgcctgtaatttcagcactttgggagaccgaggtgggcggatcacgaggtcaggagatcaagaccatcctggctaacacagtaaaaccccatctctactaaatacaaaaaaaaattagccgggagtgctggcgggtgcctgtagtcccagctactcaggaggctgaggcgggagaatggcgtgaacccaggaggcagagcttgcagtgagcggagatcgcgccactgcactccagcctgggcaacagagcgagattccgtctaaaaaaaaaaaaaaagaatgttgtgataaaaggtgatgctcacctctcccacacccttttatagtttagggattgtatttccaaggtttctagactgagagcccttttcatctttgctcattgacactctgtacccattaatcctccttattagctccccttcaatggacacatgggtagtcagggtgcaggtctcagaactgtccttcaggttccaggtgatcaaccaagtgccttgtctgtagtgtcaactcattgctgccccttcctagtaatccccataatttagctctccatttcatagtctttccttgggtgtgttaaaagtgaccatggtacactcagcacggatgaaatgaaacagtgtttagaaacgtcagtcttctcttttgtaatgccctgtagtctctctgtatgttatatgtcacattttgtaattaacagcttgctggtgaaaaggaccccacgaagtgttggatataagccagactgtaagtgaattactttttttgtcaatcatttaaccatctttaacctaaaagagttttatgtgaaatggcttataattgcttagagaatatttgtagagaggcacatttgccagtattagatttaaaagtgatgttttctttatctaaatgatgaattatgattctttttagttgttggatttgaaattccagacaagtttgttgtaggatatgcccttgactataatgaatacttcagggatttgaatgtaagtaattgcttctttttctcactcatttttcaaaacacgcataaaaatttaggaaagagaattgttttctccttccagcacctcataatttgaacagactgatggttcccattagtcacataaagctgtagtctagtacagacgtccttagaactggaacctggccaggctagggtgacacttcttgttggctgaaatagttgaacagctttaatatacaataattgttgcattattatttcagatgataaatgtggtcataagtaagaaataaatgatcgagtttagtcttttaattcactgtcctttgaatacctgcctcttactctggaggcagaagtcccatggatgtgtttatgaacatggttgaggaagatttaggaagactgcaacagtacactacctaaagcaggttttttactccatctttttttgccacgtacactggcctcccactttgatatgcttgaaattatctccttgatttgtctttcaaaactacatattgaggctggttgcggtggctcacacctgtaatcctagcactttgggaggccaagccggacagatcacttgaggtcaggagttcgagaccagcctggcaaacatgatgaaaccccacctttactaaaaatacaaaaattagccaggcgtagtggtgtgtgcctgtaacccagctacctgggaggctgaggcaggagaatcactggaacccgggaggcagaggctacagtgagccaacatcacgccactgcactccagcctgggtgacagagcaagactctgtctcaaaacaaaacaaaaaacaaaaaactacgtattaagacaagaaacagactgggcgcggtggctcacgcctgtaatcccagcactttgggaggctgaggcgggcggatcacaaggtcaggagatcgagaccatcctggctaacacggtgaaaccccgtctctactaaaaaatagaaaaaattagctggggtggtggcgggcgcctatagtctcagctactcgggaggctgaggcaggagaatggcgtgaacccgggaggcagagcttgcagtgagcagagatcgtgccactgcactccagtctgggtgacagagcaagactccgtctcaaaaaaaaaaacaaaaacaagaaacaaattaaactaatgtgatagactactgctttgttttcaaaagatacactccccaaaagttactgatctaaaatacagtagtactatctctgtttagtaagaaccctgacaactaatagtgttcttatatgtaaaatgctattcttgcctttcatttcagaatatactttttaaatgtgaatttctggatttttttttatagcatgtttgtgtcattagtgaaactggaaaagcaaaatacaaagcctaagatgagagttcaagttgagtttggaaacatctggagtcctattgacatcgccagtaaaattatcaatgttctagttctgtggccatctgcttagtagagctttttgcatgtatcttctaagaattttatctgttttgtactttagaaatgtcagttgctgcattcctaaactgtttatttgcactatgagcctatagactatcagttccctttgggcggattgttgtttaacttgtaaatgaaaaaattctcttaaaccacagcactattgagtgaaacattgaactcatatctgtaagaaataaagagaagatatattagttttttaattggtattttaatttttatatatgcaggaaagaatagaagtgattgaatattgttaattataccaccgtgtgttagaaaagtaagaagcagtcaattttcacatcaaagacagcatctaagaagttttgttctgtcctggaattattttagtagtgtttcagtaatgttgactgtattttccaacttgttcaaattattaccagtgaatctttgtcagcagttcccttttaaatgcaaatcaataaattcccaaaaatttaa

SEQ ID NO: 16 - DNA, 4067 bp, Homo sapiens
  modified_base (869)..(869): a, c, t, g, unknown or other
  modified_base (2622)..(2622): a, c, t, g, unknown or other
gaattcctaactgccccggggcagtctgctattcatcccctttacgcggtgctacacacacttgctagtatgccgtggggacccctccggcctgtagactccatttcccagcattccccggaggaggccctcatctggcgatttccactgggggcctcggagctgcggacttcccagtgtgcatcggggcacagcgactcctggaagtggccacttctgctaatggactccatttcccaggctcccgctacctgcccagcacaccctggggcatccgtgacgtcagcaagccgggcggggaccggagatccttggggcggtggggggccagcggcagttcccaggcggcccccggggcgggcgggcgggcgggtggtggcggcggttggggctccgggcgcgtcgctcgctcgctcgctgggcgggcgggcggtgcgatgtccggagaggatggccggcggctggcccgggggcggcggcgcggctgcccgggagcggcgacgggagcagctgcggcagtggggcgcgggcgggcgccgagcctggccccggagagcgccgcgcccgcaccgtccgcttcgagcgcgccgccgagttcctggcggcctgtgcgggcggcgacctggacgaggcgcgtctgatgctgcgcgccgccgaccctggccccggcgccggagctcgaccccgccggccgccgcccgcccgcgccgtgctggactccaccaacgccgacggtatcagcgccctgcaccaggtcagcgccccccgcggcgtctcccggggccaggtccaccctctgcgccacctggggcatcctccttccccgttgccagtctcgatccgccccgtcgttactggccctgggtttncaccctatgctgacaccccgttccagtccccttaccattcccttcgaccaccccacttccgaattggagcgcttcaactggctgggctagcactctgtgtgacactctgaagctctacattcccttcgacctactctcttcgattggagtcgctttaactggccctggctttggcagcctgtgctgacccatcgagtcctccttaccatccctccctcgacttcccctcttccgatgttgagcccctccagccggtcctggactttgtctccttccctgccctgccctctcctgaacctgagccagctcccatagctcaggtctggtctatctgcctggccctggccattgtcactttgcgctgccctcctctcgcccccgagtgcccttgctgtgccgccggaactctgccctctaacgctgccgtgccgtctctctcctgagtccggaccactttgagctctactggcttctgcgcgcctctggcccactgtttccccttcccaggcaggtcctgctttctctgaccagcattctctcccctgggcctgtgccgctttctgtctgcagcttgtggcctgggtcacctctacggctggcccaagatccttccctgccgcctccttcaggttccgtcttcctccactccctcttccccttgctctctgctgtgttgctgcccaaggatgctctttccggagcacttccttctcggcgctgcaccacgtgatgtcctctgagcggatcctccccgtgtctgggtcctctccgggcatctctcctccctcacccaaccccatgccgtgttcactcgctgggttcccttttccttctccttctggggcctgtgccatctctcgtttcttaggatggccttctccgacggatgtctcccttgcgtcccgcctccccttcttgtaggcctgcatcatcaccgtttttctggacaaccccaaagtaccccgtctccctggcttagcacctctccatcctcttgctttctttgcctggacaccccgttctcctgtggattcgggtcacctctcactcctttcatttgggcagctcccctaccccccttacctctctagtctgtgctagctcttccagccccctgtcatggcatcttccaggggtccgagagctcagctagtcttcttcctccaacccgggccctatgtccacttcaggacagcatgtttgctgcctccagggatcctgtgtccccgagctgggaccaccttatattcccagggccggttaatgtggctctggttctgggtacttttatctgtcccctccaccccacagtggggccactagggacaggattggtgacagaaaagcccccatccttaggcctcctccttcctagtctcctgatattcgtctaacccccacctcctgttaggcagattccttatctggtgacacacccccatttcctggagccatctctctccttgccagaacctctaaggtttgcttacgatggagccagagaggatcctgggagggagacttggcagggggtgggagggaagggggggatgcgtgacctgcccggttctcagtggccaccctgcgctaccctctcccagaacctgagctgctctgacgcggctgtctggtgcgtttcactgatcctggtgctgcagcttccttacacttcccaagaggagaagcagtttggaaaaacaaaatcagaataagttggtcctgagttctaactttggctcttcacctttctagnccccaatttatattgttcctccgtgcgtcagttttacctgtgagataaggccagtagccacccccgtcctggcagggctgtggtgaggaggggggtgtccgtgtggaaaactccctttgtgagaatggtgcgtcctaggtgttcaccaggtcgtggccgcctctactccctttctctttctccatccatccttctttccttaaagagcccccagtgctatctggacatattcctccgcccagagcagggtccgcttccctaaggccctgctctgggcttctgggtttgagtccttgcaagcccaggagagcgctagcttccctgtcccccttcctcgtccaccatctcatgccctggctctcctgccccttcctacaggggttcctggctctgctcttcagactgagccccgttcccctgcatccccgttcccctgcatcccccttcccctgcatcccccagagccccaggccacctacttggcctggaaccccacgagaggccaccccagccctgtctaccaggctgaccttttgggtgattctcctccaactgtggggtgactgcttgggcaaactcactcttcggggtatcccaggaggcctggagcattggggtgggctggggttcagagaggagggattccctccaggttacgtggccaagaagcaggggagctgggtttgggtcaggctgggtgtggggtgaccagcttatgctgtttgcccaggacagcctagttttagcgctgaaaccctcagtcctaggaaaacagggatggttggtcactgtctctgggtgactcttgattcccggccagtttctccacctggggctgtgtttctcgtcctgcatccttctccaggcaggtccccaagcatcgcccccctggctgttcccaagttcttaggtaccccacgtgggtttatgaaccacttggtgaggctggtaccctgcccccattcctgcaccccaattgccttagtggctagggggttgggggctagagtaggaggggctggagccaggattcttagggctgaacagagccgagctgggggcctgggctcctgggtttgagagaggaggggctggggcctggactcctgggtccgagggaggaggggctggggcctggactcctgggtctgagggtggagggactgggggcctggactcctgggtccgagggaggaggggctggggcctggactcgtgggtctgagggaggaggggtcgggggcctggacttctgggtcttagggaggcggggctgggcctggacccctgggtctgaatggggagaggctgggggcctggactccttcatctgagggcggaagggctggggcctggcctcctgggttgaatggggaggggttgggcctggactctggagtccctggtgcccaggcctcaggcatctttcacagggatgcctgtac

SEQ ID NO: 17 - DNA, 6065 bp, Homo sapiens
cttcagatagattatatctggagtgaagaatcctgccacctatgtatctggcatagtgtgagtcctcataaatgcttactggtttgaagggcaacaaaatagtgaacagagtgaaaatccccactaagatcctgggtccagaaaaagatgggaaacctgtttagctcacccgtgagcccatagttaaaactctttagacaacaggttgtttccgtttacagagaacaataatattgggtggtgagcatctgtgtgggggttggggtgggataggggatacggggagagtggagaaaaaggggacacagggttaatgtgaagtccaggatccccctctacatttaaagttggtttaagttggctttaattaatagcaactcttaagataatcagaattttcttaaccttttagccttactgttgaaaagccctgtgatcttgtacaaatcatttgcttcttggatagtaatttcttttactaaaatgtgggcttttgactagatgaatgtaaatgttcttctagctctgatatcctttattctttatattttctaacagattctgtgtagtgggatgagcagagaacaaaaacaaaataatccagtgagaaaagcccgtaaataaaccttcagaccagagatctattctctagcttattttaagctcaacttaaaaagaagaactgttctctgattcttttcgccttcaatacacttaatgatttaactccaccctccttcaaaagaaacagcatttcctacttttatactgtctatatgattgatttgcacagctcatctggccagaagagctgagacatccgttcccctacaagaaactctccccggtaagtaacctctcagctgcttggcctgttagttagcttctgagatgagtaaaagactttacaggaaacccatagaagacatttggcaaacaccaagtgctcatacaattatcttaaaatataatctttaagataaggaaagggtcacagtttggaatgagtttcagacggttataacatcaaagatacaaaacatgattgtgagtgaaagactttaaagggagcaatagtattttaataactaacaatccttacctctcaaaagaaagatttgcagagagatgagtcttagctgaaatcttgaaatcttatcttctgctaaggagaactaaaccctctccagtgagatgccttctgaatatgtgcccacaagaagttgtgtctaagtctggttctcttttttctttttcctccagacaagagggaagcctaaaaatggtcaaaattaatattaaattacaaacgccaaataaaattttcctctaatatatcagtttcatggcacagttagtatataattctttatggttcaaaattaaaaatgagcttttctaggggcttctctcagctgcctagtctaaggtgcagggagtttgagactcacagggtttaataagagaaaattctcagctagagcagctgaacttaaatagactaggcaagacagctggttataagactaaactacccagaatgcatgacattcatctgtggtggcagacgaaacattttttattatattatttcttgggtatgtatgacaactcttaattgtggcaactcagaaactacaaacacaaacttcacagaaaatgtgaggattttacaattggctgttgtcatctatgaccttccctgggacttgggcacccggccatttcactctgactacatcatgtcaccaaacatctgatggtcttgccttttaattctcttttcgaggactgagagggagggtagcatggtagttaagagtgcaggcttcccgcattcaaaatcggttgcttactagctgtgtggctttgagcaagttactcaccctctctgtgcttcaaggtccttgtctgcaaaatgtgaaaaatatttcctgcctcataaggttgccctaaggattaaatgaatgaatgggtatgatgcttagaacagtgattggcatccagtatgtgccctcgaggcctcttaattattactggcttgctcatagtgcatgttctttgtgggctaactctagcgtcaataaaaatgttaagactgagttgcagccgggcatggtggctcatgcctgtaatcccagcattctaggaggctgaggcaggaggatcgcttgagcccaggagttcgagaccagcctgggcaacatagtgtgatcttgtatctataaaaataaacaaaattagcttggtgtggtggcgcctgtagtccccagccacttggaggggtgaggtgagaggattgcttgagcccgggatggtccaggctgcagtgagccatgatcgtgccactgcactccagcctgggcgacagagtgagaccctgtctcacaacaacaacaacaacaacaaaaaggctgagctgcaccatgcttgacccagtttcttaaaattgttgtcaaagcttcattcactccatggtgctatagagcacaagattttatttggtgagatggtgctttcatgaattcccccaacagagccaagctctccatctagtggacagggaagctagcagcaaaccttcccttcactacaaaacttcattgcttggccaaaaagagagttaattcaatgtagacatctatgtaggcaattaaaaacctattgatgtataaaacagtttgcattcatggagggcaactaaatacattctaggactttataaaagatcactttttatttatgcacagggtggaacaagatggattatcaagtgtcaagtccaatctatgacatcaattattatacatcggagccctgccaaaaaatcaatgtgaagcaaatcgcagcccgcctcctgcctccgctctactcactggtgttcatctttggttttgtgggcaacatgctggtcatcctcatcctgataaactgcaaaaggctgaagagcatgactgacatctacctgctcaacctggccatctctgacctgtttttccttcttactgtccccttctgggctcactatgctgccgcccagtgggactttggaaatacaatgtgtcaactcttgacagggctctattttataggcttcttctctggaatcttcttcatcatcctcctgacaatcgataggtacctggctgtcgtccatgctgtgtttgctttaaaagccaggacggtcacctttggggtggtgacaagtgtgatcacttgggtggtggctgtgtttgcgtctctcccaggaatcatctttaccagatctcaaaaagaaggtcttcattacacctgcagctctcattttccatacagtcagtatcaattctggaagaatttccagacattaaagatagtcatcttggggctggtcctgccgctgcttgtcatggtcatctgctactcgggaatcctaaaaactctgcttcggtgtcgaaatgagaagaagaggcacagggctgtgaggcttatcttcaccatcatgattgtttattttctcttctgggctccctacaacattgtccttctcctgaacaccttccaggaattctttggcctgaataattgcagtagctctaacaggttggaccaagctatgcaggtgacagagactcttgggatgacgcactgctgcatcaaccccatcatctatgcctttgtcggggagaagttcagaaactacctcttagtcttcttccaaaagcacattgccaaacgcttctgcaaatgctgttctattttccagcaagaggctcccgagcgagcaagctcagtttacacccgatccactggggagcaggaaatatctgtgggcttgtgacacggactcaagtgggctggtgacccagtcagagttgtgcacatggcttagttttcatacacagcctgggctgggggtggggtgggagaggtcttttttaaaaggaagttactgttatagagggtctaagattcatccatttatttggcatctgtttaaagtagattagatcttttaagcccatcaattatagaaagccaaatcaaaatatgttgatgaaaaatagcaacctttttatctccccttcacatgcatcaagttattgacaaactctcccttcactccgaaagttccttatgtatatttaaaagaaagcctcagagaattgctgattcttgagtttagtgatctgaacagaaataccaaaattatttcagaaatgtacaactttttacctagtacaaggcaacatataggttgtaaatgtgtttaaaacaggtctttgtcttgctatggggagaaaagacatgaatatgattagtaaagaaatgacacttttcatgtgtgatttcccctccaaggtatggttaataagtttcactgacttagaaccaggcgagagacttgtggcctgggagagctggggaagcttcttaaatgagaaggaatttgagttggatcatctattgctggcaaagacagaagcctcactgcaagcactgcatgggcaagcttggctgtagaaggagacagagctggttgggaagacatggggaggaaggacaaggctagatcatgaagaaccttgacggcattgctccgtctaagtcatgagctgagcagggagatcctggttggtgttgcagaaggtttactctgtggccaaaggagggtcaggaaggatgagcatttagggcaaggagaccaccaacagccctcaggtcagggtgaggatggcctctgctaagctcaaggcgtgaggatgggaaggagggaggtattcgtaaggatgggaaggagggaggtattcgtgcagcatatgaggatgcagagtcagcagaactggggtggatttgggttggaagtgagggtcagagaggagtcagagagaatccctagtcttcaagcagattggagaaacccttgaaaagacatcaagcacagaaggaggaggaggaggtttaggtcaagaagaagatggattggtgtaaaaggatgggtctggtttgcagagcttgaacacagtctcacccagactccaggctgtctttcactgaatgcttctgacttcatagatttccttcccatcccagctgaaatactgaggggtctccaggaggagactagatttatgaatacacgaggtatgaggtctaggaacatacttcagctcacacatgagatctaggtgaggattgattacctagtagtcatttcatgggttgttgggaggattctatgaggcaaccacaggcagcatttagcacatactacacattcaataagcatcaaactcttagttactcattcagggatagcactgagcaaagcattgagcaaaggggtcccatagaggtgagggaagcctgaaaaactaagatgctgcctgcccagtgcacacaagtgtaggtatcattttctgcatttaaccgtcaataggcaaaggggggaagggacatattcatttggaaataagctgccttgagccttaaaacccacaaaagtacaatttaccagcctccgtatttcagactgaatgggggtggggggggcgccttaggtacttattccagatgccttctccagacaaaccagaagcaacagaaaaaatcgtctctccctccctttgaaatgaatataccccttagtgtttgggtatattcatttcaaagggagagagagaggtttttttctgttctgtctcatatgattgtgcacatacttgagactgttttgaatttgggggatggctaaaaccatcatagtacaggtaaggtgagggaatagtaagtggtgagaactactcagggaatgaaggtgtcagaataataagaggtgctactgactttctcagcctctgaatatgaacggtgagcattgtggctgtcagcaggaagcaacgaagggaaatgtctttccttttgctcttaagttgtggagagtgcaacagtagcataggaccctaccctctgggccaagtcaaagacattctgacatcttagtatttgcatattcttatgtatgtgaaagttacaaattgcttgaaagaaaatatgcatctaataaaaaacaccttctaaaataa

SEQ ID NO: 18 - DNA, 19856 bp, Homo sapiens
aagtgtgagcaatgacgaaactggagagatagggttttaacaagatgcaaggacaatctgaggactgagagccatttcaacgtgagcccccagtctgagaacaagaaagaagaacttctgtctcgaggtaaaaaggcctgctggggacctggggtccaggtgaagggatgggatggttgacagaactgctcaggtgaggacaggcttctcatgaggtccctgagaaacttgccttttggagggaaatgtcctctgccctctggagcctggggagaaggttatttctgcccgccagaccagcatgctcgcttttcttccatgggcattcaggaatcctggccccattctgacattcctcaaatggaggaattcctcaaattaccagaggaaagttaccaaagtttagatctgctggagctcttcaaggattggcctgagacaagccgggaggtgccacggggcttggagctggccctgtgaggcacctccgggggaagttcatgtcctaggtggttcacgtcatggacctcttggaggtccgtgaatagatttattcatgggatttgtgaattggggggaaaaatacatctttattttcactaatctttaattgaaagtcagcacttgcttcagttatgaatgtagacaatgaaccacaatagaatttgccatcaatagaaaacacaaatattttcaaatctcattacagtttttatagatttctccaaatgtccttaacgctcagcactactacagaattacaacagttattaggctgatgtcaaatctaaagaagcatgtgtactgctctaccacacattcttctaatgttttgacaactgtcttgtcataatttgttccctttattatcccatgtatcttattaatttttaaatgttgttctgagaagggactccatatgccttcccagaccaccaaagaggtccatggcgcctttatgtcaggcacctgctttggtgtgttgagcaggaagcctgagatctcagacaagagcttcaagggccccccagcccaaacctctgtctactaacaagtctggttctactttaaggcagttggggttgtggagattgaaaaagaagccccttcacagctgcaaatgagatctttctgggcatctttttcagtgtcgtgggagatctgtatacagaggtatttgtggagctcagagctgaccttccagctcctctgagaggttagatccgggctccggtggcagaggaaatggagactcttccttgccctcttgtccccaccctccccagaaaacctctggcaaagctttatgtgtcatctaaccgtcaccacattcctatgaggtagttttaaacacaagaggaatgtgaggctgagtgaggtccagcaatgtgctggtcacacaaagcttggatttgaacccaggagtccacaagactccaggaccgcctccgaaggtgcgggagggaagagtttcccgccgtctgtgagctgtcgcctgagagaggcaccgagccctggggccaccagcgcagctcaggagccccggggaccatcaaagatgaggatgccaactccacgggcaccctcccccctgcccgcgctggggctcacaacgttttaagaggggagacccgcccctggcgtgtagtgggcccggaaaattcccagacttctcacgaccacccgctctcccctctgttgagggccaggtgccgctctagtacatgctgcgtccccaggacccaccaggcccaactttgcaccccctcatctcccctcctagtttagactttccctggctagcccccatgctcgctggatggcccatggctggagtgacgcgggccaacgcggggcaggtagggggtcactcggctttggctgaaaggcagcgccctctagcggccagagtgcgaaatcagcgccgccggctccgcgctgccccgcctgcatcacaacagggtgctcccctcccgggcaccaaggtcacttcccagagcatccttgcccagtgacctcgctgccccccagcgctggtgaggggcccacaacagacttacatgctcttcttcaactcggccctaggcaccgcgaagtctggccactccagcggagtgaccagctgcatcagcccctcccgcctgtcctctctctccttggaagcggtccctaccctgcgcccctcccatcccgctgcaccagtcccttaggaaacacgcctagagaagggacacgaccttgtcaacattccacagctacctagtgcggagccaggactggaagccagatctcctcagcccattccccaccttaattcacccaccgtattctttagtcaccagctcccgagagcccacaaacaactatgaaggcctaacttcattgccatcttgcagcctttccacatccctcatccagaatttctcctgtgctgccccttgacactttatgaccttattacttagtacagtcgttcttgtgttaacagctgttcgtgaatggatgagcggctgtgaggagagggacaaaggggactccaagagaaagactctcataacttgggttagagtcctgctccccaacttaggagctgtgattttaagcaagtcacaagtcccctccaagcctctatatgcttcgtacaaataataaattttagaaaataataatggcttagtgttttataaggactaaacacagtcttgcaggtagatgtgcctggaacactgtccattgattccaatataagaaagcataaaactaatcatagctatcatttattgagcccttactctctgccaggcactgtgctaagtaatttacataggtgacctcatttgaccctcacaacccaaggaagagaatattttgtcaccattttataggtcattaagagattaagaaacttgcccaatattacacagatagttaagtttcaaagccagatctgaaacatcctggtctgactctagagaccatttaaccactaaaacgtccgcctctgctgtgttagtgatctctctgtgccccatggtgtctgacacattatagatgctccgtgtttctgaaatatgtctatttattaaaggctgagcatagcgcctggcccaggagcctaagaaacttgaccgagtcatgcaactattaagttttttttgtttttatttttgttttttcgagacagaatcttgctctgtcgcccaggctggagtgcagtagcgcgatctcagctcactgcaagctccgcctctcgggctcacgccattctcctgcctcagcctcccgagtagctgggactacaggcgcccgccaccacgcccggctaattttttgtattttttttagtagagatggggtttcaccgtgttagccaggatggtctcgatctcctgacctcgtgatctgcccacctcggcctcccaaagtgctgggattacaggcgtgagacaccgcgcccggcgccactattaagttttaggaccaggatttgaacacaaacactctggctctagagtctacgctttttaaccataattctgggctgaatgaataattgcaatccttctttgtcttcctctttgaataaaatgatttgtcattttattcatttatcctctttgtcacttaatattccatgtttcaagagtcaccaggacattctggtgtagcatgaaggtatgataacacaggagaaggaacaaggagaggtcaaggctaggaaaggacattggggccataccatgagctgctgctgggatgttttattaggattgtgacaaatgtatagataagtacagaagaatttaacaatcgtctctacttagattttcttttatgttccttaatagtactgtatagtttgtatcctataggtcctattcggaatgttgttacatttttctggacatttgatgggttttttggttgctataatgaatggaacttttccttctaccatattttctgactaataattatatccaggaaaatttttaatcttatgtattaataagtaccttattaaattgtatgtatatacactaatttagtttattgttttatacaaactataattacataacattctattctgtggatctgcaataatttattcaaccattctcaccagtgggtcttcacctgtttcctttttttatgggggcaggaaggcgacaaagttttgctctgttgcccaggctggagtgcagtggcgtgatcttggctcactgcaatctctgcctcccaggttcaagcaattatcctgcctcagcctcctgagtaggtgggatcacaggcacctgctacaacacccagctaatttttgcatttttagtagagccagggtttcaccatgtgggccaggctggtctcgaactcctgacctcaggtgatccgcacgcctcccaaagtgctgggattacaggtgtgagccaccacacctggccttcacctgtttctatttttttggtattataaaaaatgctgcagtgaatatccttgtacatctatactagcacactcatgcttttatttctgtaagctatagccaaagggacagggtatgtgcatttgaaatgttaatatataatgagtattcccccaaagctccgtaacaatgtatagttctacctagagtgaatgattgcacatatttcttcttacccttaccaaaatttgatttatcttttaaatttttgttcacttaacaggtggtaattctgaaattctgaactctgaatttttaatttgtacttccctgaatacttgtaaaactgaaaaactttttattgcatttcgtcttttgtgaactgcctattcagatactcttttattgtttctaataattctcaattaagtttcttgggttttctagatgtaagttatatcacatataaatagtaataaatttgccttaagatttccaatatttataccctttgctttattttcttgtctaaatataatggcaaacactttcagaacaatgtgaaataacagaaataataggaagcatctctgccttgctcctaatattaatagaaattatcccatattttaccattaaatatgatgctgcaattttatctgagatatacatttctccattatattgaatagtattcatccattaccattttacttaggattttagtgggaattaatgtaagatgttatcagaaggtaatattgactttcttttttatccagtagtatgttaattaatagatttcctaatattaaatcatccaagaatttctaaaaatgaaaccttattccatttgtcatggtgtattatatttttaatatcttgtatgattggttaatttgtgtgtgtgtgtaatttttgattttggttttcttgagacagggtctcactgtcaaccaggccagagtgcagtgaagatcatacctcactacatccgtgaactcccgggctcctcccacctaagtctcttgagtagctgggacttcaggtacgcaccaccacacgtggctaatttttgtattttttgtaaagacatggtctcactttgctgcccaggctggtctcaaactcctgggctcaagtgatcctcccacctcggcctcccaaaggcttgggattacaggcgtgagccaccgcaactgggcctttcaatttttaaaaatttaaatataatattataaaacagaatacagcagcacatgaaaagaataacatactaggccgggcgtggtggttcacgcctgtaatcccagcactttgggaggccaaggtgggtggatcacaaggttaggagttcaagatcaccctggccaagatggtgaaaccccgtctctactaaaaatacaaaaattagccgagcgcagtggcaggcgcctgtaatcccagatactcggcaggcgcctgtaatcccagatactcggcaggctgaggcaggagaatcgcttgaacccaggaggtggaagttgcagtaagccaagatcgtgccactgcactccagcctgggcgacagagtgagactctgtctcaaaagaaaataacaacatactatgaccaaatggcttcagtttttgtttgtttgtctgggactgcaaagatgtatcaattttaggaaatctattaatgtagatcgccatcttaatatatcttaaagaaaaataatatcattttagttgatatttaaaggcaattaataaaacattcacatccatccttgacattttaaaactcttaataaaatagaaataaatgtatattccttaacataataaaatacatctcattctcaaagctactataatacttaataaggaaacatttaagcatcccccattaaacttagaaaaaagacagagattcattattaccattattatttaatatttttctggagatattaaccaacacaattagaagaaagaaatcagagatataaaatagaaaaggaagtaattatcattatgtacacataatatgattgcataactggaaaatccaagagaatcaactgaaaaatgatagaattaagggaggggagctgggtatgaaattaatatctagtaaaacaaatagcctttcatatatgaacaataatgaaaaattaaaagatataatgaatgatataaagagactgaaaaaataagttaaaagatacaacgagtggaaacaacagatgctggagaagatgtggagaaataggaatgcttttacactgttgatgggagtgtaaattagttcaaccactgtggaagacagtgtggggattcctcaaggatctagaactagaaataccatttgacccagcaatctcattactgggcatatacccaaaggattataaatcattctacgataaagatgcacaagtatgtttattgtggtactattcacaatagcaaagcctgggaaccaacccaaatgtccatcaatgatagactggattaagaaaatgtggcacatatacaccatggaatactatgcagccataaaaaaggatgagttcatgtcctttgcagggacatagatgaagctggaaaccatcattctaagcaaactgtcacaaggacaggaaaccaaacactgcatgttctcgctcataagtaggagttgaacaatgagaacacatgaacccagggtggggaacatcacacaccgatgacgttccacgggtgggggcccgggggagggatagcattaggagaaatacctaatgtaaatgacaagttgatgggtgcagcaaaccaacatgaaacatgtacaactatgtaacaaacctgcacattgtgcacatgtaccctagaacttaaagtatattaaaaaaaagatataatgggtaaaagatgacattttcaatagtgaaaaaatatgaattactcaagaaacaaacttagctaagaaatggacgaggactttatgaagaaaacttctatacatacctgagacacacatatttgaaaaatgaatatcacattctcggatcaaaagaatcaatgtcacaacaaattcagttctccctaagttaaaatataaattgaacatatcccaattttaaaataccaataggactttttcttgatggtacacacagtaggaagggcaagactagacaagctgattataaaaatcagaaaaataaatttatagaaaaattcttgttttccccttttgaattttaaatgctgtgaatgtaattaccacttcaaaagttataaactacaaaaccttaaatatatttttaaaacacatacacacatagagaggattttttaaaataaaaatgtatttattttatatacataattgcaatttgccctttttgacctaatgctatatcatgaacatccctccaggcccatatttatagaagtatctcattcttttaataatatataatattttgtcacatagattaattgaaacttattaaaccattttccctattgatgaaattcaagtgtttgtttttcttcagtttgtttattttgaaacaggagtaatttttcttagccaggattagaagatgtaactataaaaagtaaaacaataaaaatattgaaagaaaattatagcctcaattggagggaaactttcctaaacaatgcaggaaacccagacaacttaaaggaaaagatagatatgttgtatttaattacatacaatgtaaactttccttgtgaaaaaaaagcctcataaaaaaagtgaagagacaaacaacaaattgggagaaagtatttgcctaaaaaaatggcagatgggttaatatctctaatacggagaaagtgcctaaaagttaagaaatgtgaagaatatgaacacacaattcacagacaagggaatactaatgaccaataagcatatgaaaagatcctcaacttcactaatcatggaaatgcaacataaagcaggtctaatttttcatccatcagattggcaaaaatgttaaagtacagataatacccagagctagcaagggcacgaggaaatgtacactatcaagcattcttggtgaacatctgattatcaacagcctttttggagagcaatctgattatagtagaaaaaaagttttaatcatcatattctttgacgcagcaatccaatttaacttaaaaaaatatatatgagaaaatagcctttagtgtctccctatgcccctccctccccggctcccagtgtatctcacttggtttaccgcctcacttcccagccagctggactctcatgcccaagccctcctctacctccatcatactctagccaatcaaagctagagcctgggatggggaaatggtcttggaaccctggaaggctttgtctagtgggtccccctgtgcttttaggagactgaagccaaggataccagcagagccaacatttgcttcaagttcctgggcctgctgacagcgtgcaggatgctgttggaacccggcagaggctgctgtgccctggccatcctgctggcaattgtggacatccagtctggtggtgaggatagaccctagagcagagacggccatggggaggatcctgggcttgtgggaagggctggatcccgtgattttctctagtggggaaacaaaggactcttttttttttttttttttttttgagggagtctcgctctgtcacccaggctggagtgcagtggcgcgatctcggctcactgcaacctccgcctcccatgttcaagcaattctgctggctcagcttcccgagtagctgggactacaggcttatgccgccaccgccggctaatttttgtatttttagtagagacggggtttcaccatattggtcaggctggcctcgaactctgcctgacctcaggtgatcctcaggcgcccggctgactcactctccttgacattaaggaaagggtaaagaatatattgtctttttctttttcattagaactgatactattgcctctctatcagacactctgtctctgctatatgtttcaaagagcctggcaatctgcgcctcaacctaagattcctttaggctcttatatactataaatttatgaaatccaggtttgagatccagatactgcaatcttcattaacttcagcagctagtttaaccactctgtgcctcaatttgtgtatttataaaatgggaagagtaatacctgccctctatggctatactgaggatttgatatacagaaaagcactctaacagagaccctatagaagttccagctggaaagtagaaataaaatataaaccattttggagtgaatcaatggctgggattgcaggtctccctcagatatgggtcttggaagacccatatctcttactcttgtaggagaatggcattcaatatgcagggggcagcctccatctctgcctcttcaccgttttcatgagagtgaatttagtttactatgtataccaaggggagtcttaaaaggaaaagcaagtcatagcggatcaagctgccaagggagtgggggagggggctggcagcctcagcatctgccggatgagttttcagcagagagctggatttaaccgaggttggggttttgcgaggatccatcacagtaggagtaaagctaagggagctgagggtggatataagggagagattataataatggactacaaaatataaactacagaaggaagtgaagtttgaggagagtgaggggcagtacaaagttggcagggccaatgcattgcaaaattaggtcagagacacccatcgagccaaaacatcctgggttaacccaactattttctccacttctgtatccaggttacagattacttacagggaaaatcaagtgggcagactggcaccatcagagtcatggtctttggatatcaatggtccctcaataattagtctgtttctccagtccattctcactccatttccacacagtggctgtttttaatcatctctggtatttctgtggtctctctcatcctatatttcttagaaaaacttttactcatccttcaagtcagctccagcactaacttcactgtgaagtttccctgatgcttcagactcaggaatctctaagattcctcaattataataactgtggaattaaattgtaactttttgctaatttgtttttacattaggctttaaactctgagagtggccaggcacagtggttcatgcctgtaatcccagcagtttgggaggcagaggcaggagggttgcttgatgcctagagttcaagactagcctggacaacatagtgagaatctgtctctacaaaataaaaaattagccaggcatagtggtgcatacctgtagtgttagctattcggaaggcggaagcaggaggattgcttgagcccaggagttcaaaggtgcagtgagttacgattgtgccactgccctccagcctgggtgacacagcaagaccttgttttaaaaaaaaattttttaaattaaaaatccccggtcatctaatggttaggggaaaaaaaagttctgacagtagggctcacgtcctagtcctcatagccccagcagggcttggcagagtgaatacctaaacgtatttgttaagtggaggaacaaataaacctatgaattaatggatgctttgagcatattatttagtcccttaattttcattttccagatgaataaactactgcccaaggagttaggtaacttgcttacagtcacacagccatcgatagagctggaatttgtatttcctgtctgccagcactactgccaggttctgcttcagtccttccttgaagacttctagtgataaggagcagttacggtgaaattcacagaatgctacctgacctctgggtaattcttccctttccattccaggatgcattaacatcaccagctcagcttcccaggaaggaacgcgactaaacttaatctgtactgtatggcataagaaagaagaggctgaggggtttgtagtgtttttgtgcaaggacaggtctggagactgttctcctgagaccagtttaaaacagctgagacttaaaagggatcctgggatagatggtgttggtgaaatatcatctcagttgatgttcaccataagccaagtcacaccgttgcacagtgggacctaccagtgttgtgccagaagccagaagtcaggtatccgccttcagggccattttttctccattctattcacaggtgagtgctcaaatactcctaatgccaccaggtgggacagtgagcagggttgacagtggagatgtaaccagatagttcaggtcctggaaaggcagtttccttcttcctcaatccttttccaacatccccattggcagatgctgcctttcttcaaagcgcacacacaaacataatctcattttgtctttaattttagaactcttacttggggtggccattgcatttttactgacagggagatggtgacacaggggttgaagagacttgtccagtgctactcactggtgaaagtaaaaacagatagaaattaggcttcctggccaggcatggtggctcatgcctgtaatcccagcattttgggaggctgaggtaggcagatcacccgaggtcaggagttaaagatcagcctagccaacatggagaaaccctgtctctactaaaaatacaaaattagccgggtgtggtggcgcatgcctgtaatcccagctactcaggaggctaaggcaagagaatcgcttgaacctgggaggcggaggttgcagtgagccgagattgtgccattgcactctatcttgggcaactagagcgaaactgtgtctcaaaaaaataaaaaacaagaaaagaaaagaaagaaattaggcctcctgattcccaattcagaactctcccagaaatgtggctatatttctaaattcaggcagacaacgagattaggtttgagataatatgggtgtctgtcttaaggagcatttagttggaggaaacagaaaccaattcaaagtaccatagattaaaggaggaaaaaataaaaaagtacagctggccctcatgagttctagctcctggaatcagaaactagaaaggggacaggacgcaaaacagttaccgtttcaaactgtgaggcagcaaggcctctggcttctgcatctgtctttcactctatgcatgctccccctgctccattactactttggcatatcctaaatatggccactccagccccagctttaagtggcttccttaagtcaaattgtgcccaacagaaagtgtctctctgtgtaactatattcctagacaatagagcaagccttcaaaattctgtgggaaaaaaaaaatttacctagaattatatattcagccaaactataaaccaaatgtaaggaaagaaaaaagacactatcatgagatgcaatgactcaaaaaaatttgccttccatgtgatcttttcaaagaagctaccagaggatgtgcttcagtaaaacaagaaagtgaatccataaaggggataaaatgacatacaggaaacaaggagtctaacaaggaagttctaggctggacacagtggctcatgccagcacttttggaggccaaggtgggaggatcacttgagcccaggagttagagataagcctgggcaacacagggagacaccatctctagtggaaaagaaaaaaaaaaggaaattcaagaattaaaaaagggcagttagtccagaagagagcaagagaaagacgactctggaagggagatctctaggaggtaaaaatggaatcgacatatcatctttctaaaggcccattaaagacccaataaaaagattaaagaaatggatatggaaaactctgccagtaaaaaaataaaatcaggctctagaaaaaactaaattttacaaaagaaacatagcgcacaacttgattttgcaaaaaataacacagaatccaaattatgtaaacatgactaatttaaataaaatttgtggtacaattatttttagaagaatgcagagaaggaaaatgggtgaaagtataatcctcatctactatattctagcacatcttcatctactgtagcagaaagccaatagaaaatgtctaaattttatcactaggaagcagcaatatgagcatattatttaggaatataataagacatctcgaagagttgacagtggttgtctcagacaataagcctaggaggacaaaagggcactgctattattctctatgaacttttacaactatcttacttctccatgaacttacaactatcttacttttttttttctttttctttgattttttgagacagactctcactctgtggtccgggctggagagcagtggcgtgatctctgctcactgcaacctccacctccaaggttcaagtgattctcctgcctcagccgcccaaatagctgggactacaggcacacgccaccacccatccaactaattttttttgtatttttagttgagacggggttttgccatgacggccaggctggtctcaaactcctgacctcaggtgatctatccgcctcagcctagccaaagtgctgggattacaggtgtgagccaccgtgcctggcctatcttactttttaagaaaaacaagtataaattacccactcaccaccctccccccatgaaaaactggcccagagcctttgaacaaatgtttctaatcacctcctatggttcctagttaattcaaattttcaacttgtttagtttgactgactttgttccttgcttcctggtgtcttcctgtctgacctagctatagcattcagcacttctgactattccctccttcatcaaactgtcatctccagtggcttctgtgactgtactcccctggctgttctacccacctggctgttcttttgtcttctctatttcctcctcccacctctcaaacatgagtattccccaagactcacttctcaccccttcaaccttttctctttactctctctccctagttctcatctacccacgatttaaaccagcatctccctgcaactgaccagcaaatcaacttctccagcttgaacacctttcctaagttttaattaaacgtttaaactaaaaactgtactcctagctcctggatgtcccaccatttcctcaaactcagtatcaaagctatcctcctgagaccctatttctgttcatgacggagtcaactttggttcctccttttttcttaacccccaattcagagagttactaagtactgctgttcttccgcacagcagtacttagtggggaagaatagcagtactttgttattcctttccttccaaaggtgtttttcaggtcttcatcacctcacacttaacatattcctatagtctcctaactagtgagtcccttgagttcagcaactgtgccctagtcacctttgtatctcccacacctaccacagggcctagcactgagctgttgcctaatggtccagcaactctaaatactgtttctgcctccaatccattctacatactaccaccagcttgtctttccaaaatgctaatttgtacatgccacatcactcaaagttttaatggcttctcactgtctatggaataaagtctaaattacattagcctggcactagagactctatagcatttcattctatttatgtgaatacattgcttcagttaaactgcactagtggatactcctctttcattcatctaacaaatatgtattgtgcatcccaggcccagcgctatgccttggagaacagaatgaggtataacacagtccttgctccttataacctaaatcctgttctcctaatatattgttttagttgtgaagattctccctaaggaagaatgcttttctcatcttctcagcatatttaagtattagagtcagcacatctagatggttccccaagtgtggaaattaggtgcattttggaaggtaaaactagttaagaagagacaggtaataaacaatgtcagggtgggtggtggctcacgcctgtaatcccagcacttcaggaggctgaggctggcagatcatttgagatcaggagttcgagacaagcctggccaacatggtgaaaccctgtctctactaaaaatacaaaaaatagccgagtgtggtagcacgcacctgtaatcccagctacttgggaggctgaggcaggagaatcacttgaacccgggaagcagaggttgcagtgagccgagattgcgccactgcactcgagcctgggcgacagagccagactctgtctcaaaaaaagaaataataaaataaaataaaaaacaatgtctgccatttactgagtgcttactgtgggccaggcattgtgctaagtgatattatattatttaatctccatggtcttttgagctattgtcctgtgataactcaagcttgaagataatttatgttcatccaacagtaaatgatggataaaaatccagatctagtccaggtgcagtgtctcatgcctgtaaccccagcacttagggaggccaaggcaggtgcatcacttgaacccaggagttcgagaccagcctgggcaacacagtgaaaacctgtctctacaaaaaatacaaaaattggctgggcgtggtggcacatgcctgtagtcccagctactagggaagctgaggtgggaggatcgattgggctcggggcatgaggctgcagtgacccatgatcatgccactgtactctagcctggatgacagagcaagaccctgtctcaaaaaaacaaaaacaaaacaaacaaacaaacaaaaaaaacccagatctattccaaaagggcaagattttaacttatgctagattgcttgaaccactctagaaaatggggctatttggggatacccaagtccaaggcgactaagctgtttcagctatctctgtggcaaaactttagaattactttaagatctatctgcatccctagtgtctgacacacaggagattctatacttatttatggctgcctaagtacatcatcattacccacaatgttaaaaatacttatttgggcaacgaattacagagggaggaatccttggagatcataaaagagatgttatgagatgatgcaaaaggagatactgatgatttctgaaaccctcccctgatccatgattctcttttgaaccagagacagggaactacacagtgacgggattgaaacaaagacaacaccttgagttcagccataatgaaggcactctcagttcaggcttcctacaagaaaaggtctgggtaatgctggtcaccagccttgtggcccttcaaggtatgtccaaaagagccgtaagcaccccaagcaatgagggtgctattatatttctgccaccttggttattctccaggaggagaaggttggaaaggatgtccagggggagagaaaaatgttactcaagccctggctatccacaggaaagttcaaaccagtttcactgatccaaaggcactaaggaggaagacagataaatcagacttttcaatgggtaggaggtaagactcattaggaatgaaggcctgtgagagaggcaagttagtacaactacctctactcactgcatgaacagagggctacaagttgaagcaacagattttcagctattagaggaagaaaaggcaagagacagacttggtttggagatgggttttgaacaatgcggctcctcagcaaaggctgatggccagattgagtatattaaacacatgtagctgagtcctctgaaaaccatttaccaatatagattagcgttttccctattagataacaaaaagtgaaacttccaataatttgtcataacgtttttgcataacaagcaactgattcaggtttttgcctggccttggcattcttaactccattttatttaggcattcctcaaatcaataactaccactgttttgaatggcatcagaatgtaagctctatatatatgtaaggactttgtcttctttaccccaacgaaaagtcccacacatatggcaggctcttaataaatttgttaaaaaacctgtatgatgaatcagatgctttacacatgatgattctaaccttatacaacccttgcaagcaaacatcccctggttactcatcaggaaacagacacaaggaagttaaatagggcctggtgcggtggctcacgcctgtaatcccagcactttgggaggccaaggcaggcagatcctttgagcctaggagtttgaggccagtctgggcaacatggcaaaaccccaactatacaaaaaaatacaaaaattaggcatggtggcacacaactgtagtcccaagctaaggcatgaggatcacctgagcccaggctggttgaggttgcagtgagccatgatcatgccactgtactccagcctgggtgacagggtgagacactttctcaaaggaaaaaaaaaaaaaaaaagagttaattgttgcccgtcacagcaattaatacagatccttctcactctaaaaccttacactcagtaatgatctactatatgcaaagcacctcttacatccttcaccaccccattcattctgagattgactcctcccctttccagaaacaggaccacctaaacattccctattccagtcccttatttgcaagtcatcaaaagaaaacagagatttcaaaaagaaaacagagaccttatctgtaatccttggtaaggatcttccaaatttaagcctatgccagttttcaggaggaaacatgaatatgaaacagtctgacctttagacataattttttgttgactttaaattcccttggttaggccactgtaaccagtaaaataaattttattttagaataaaaattataaaggggaaattgagtctagccatacaacctactactagttactatctttgattcccaagtcatcctagagcaaaaaaaaaaaaaaaaaaatcatctctggcctttttttccttttccactcaggtgaagagaatgagcttttgaatccaattttttgttttctcctatattcaattcaagtagctttaaagttaaccaaaggaaaaaaccaaagctcaatatttgattaaacgagaaaatatacactacttagaagctttcttttctttatccttcttccccaactcaaggcttagtagaattattgaaagaggtagtattcagtagaatagtacacatgctttttcaggtccagaaacaccacataggtcaagttatcatgcttacatgtggggaaaaggaggagggagtttcctggacctctgtgcctctctcagctcatgaactagtttcagtgaatatccttgtcttaccactgtgccaacaattcagagctatacgtggaaaacctaccttcaactttttgagtggcatctattgcttctttgattgttccttccagcaaggagcgatcaaaggctagcccccttcccactcccaccagaatcagatttgctcaagattacaaccctaatttagtaataagatgcaatacataaaatagttcccactttccttttccaatccctttacagtcatgagggcctatcacgcacgcatctcaggacaggtgagacttcattatatcaggtattttgttgctattctaagttataaggcagtaatacaaactttctttccacagctttgtaagccttgtgccaaaagaaacttttaaaacagctacagcaagatgagtctgactatggcttagtatctttctcattacaataggcacagagaagaatgcaacagggcacaggggaagagatgctaaatataccaagaatctgtggaaatataagctggggcaaatcagtgtaatccttgactttgctcctcaccatcagggcaaacttgccttcttccctcctaagctccagtaaataaacagaacagctttcaccaaagtgggtagtatagtcctcaaatatcggataaatatatgcgtttttgtaccccagaaaaacttttcctccctcttcatcaacatagtaaaataagtcaaacaaaatgagaacaccaaattttgggggaataaatttttatttaacactgcaaaggaaagagagagaaaacaagcaaagataggtaggacagaaaggaagacagccagatccagtgattgacttggcatgaaaatgagaaaatgcagacagacctcaacattcaacaacatccatacagcactgctggaggaagaggaagatttgtgcagaccaagagcaccacagactacaactgcccagcttcatctaaatacttgttaacctctttggtcatttctctttttaaataaatgcccatagcagtatttggagtcttttcttttctcctaaatccacaaactctcttctttctctttggacagatgacctcttgtcatagttaagcagagagtgggcaggatattcctgataggaggaactacatgaataaaggggtaag

SEQ ID NO: 19 - DNA, 16303 bp, Homo sapiens
cgtcctatctgcagtcggctactttcagtggcagaagaggccacatctgcttcctgtaggccctctgggcagaagcatgcgctggtgtctcctcctgatctgggcccaggggctgaggcaggctcccctcgcctcaggtaaggcctgaaacccagcagagcagcagggaggaaaaacaaggctaagcttggttggagacttgggtgcttgtgtagggaagactccaagagcatgccacagctgcttgagagaaagaaattgcaacttttagagtcctgtgtactcttatttaagaaaggacaatctctgagaatgaggtggggttctgtttttggtggcagatgaaggactttgcagacttccggggttggaggagcctgactggccagcacaagaaggagcaggagaagaagaagggctgggcaggaggcattgccagtttgcttttagaagctcattcctgctccagcttcttttctgttgcctttcaggaactttccaggaaaacattataagttctctgtgaattgaaaatgtctttttcacagattccagaggttctaccactagagactgattttttgttaaatttatttcttctatattaaaaatcagagtcaaatatttctgagggaggggaacacaaatatttaaaaactgtggtataaattagtttttatgttgccttctgaactatctgaggatggagatgtgcccagggttgctggggagaggttaagtgctgagagggtggttatgcctgggagaagcagggtttcctgctaagcttcctttgctattggatttcttggctttcctgaaggttttttcaggcactgcaaatgacaatcaaccaaacagcaaggttttatttcaaaggataatgcatccagcatagaactaggccgcaggaagaaacataaaaacaaaacaaaataaaaacagaagaggtggtatcagctgacaagggcttatattctaagtgggtagacaaaataggcctacgaaaataacaagctggccatgaagctacatagcagaatatgcgagggggcaacgtgctaagttgtgtagtcataagccaggcatttagtaaggtgctaattatacaatacaggcagtgaatgtgaaaggaaaagggaggttgagatgggctgaggtcttctaggaggcggggagggagtgcagccttgacaagcctccctgtgggcgaggtgtaaagaggggcagaagtcagctctggaagcatagggcagtgggtggggaggagatgggctgggctgggctggagtagagatgtgtggagaagggtgagaagactggaaagacaacctgaatgggggactgggagccttgaataacaggcatggagaggagcgtctcttgaaatggaagaaacaggaaataattacagcctctatggaggagcaacaggatggactggagaaactatcattccaaaatccagttggggcctcaaaggcccttagaatttttctaggaaggttgaaggccagctgctgacccaggactcacatgtgcttcgtcctcttccctaggaatgatgacaggcacaatagaaacaacggggaacatttctgcagagaaaggtggctctatcatcttacaatgtcacctctcctccaccacggcacaagtgacccaggtcaactgggagcagcaggaccagcttctggccatttgtaatgctgacttggggtggcacatctccccatccttcaaggatcgagtggccccaggtcccggcctgggcctcaccctccagtcgctgaccgtgaacgatacaggggagtacttctgcatctatcacacctaccctgatgggacgtacactgggagaatcttcctggaggtcctagaaagctcaggtattcctgctggagcaagttggtggataaacctctccctctagcatagaaaatgcaatcctgaaacactgcacagcagggcttctcaattcgggatcacatttgaatcacctgaggagattttaaatcatactgatgccgaggcctcacccagaccaattcaatcagaatccctaatagcagagctaaacaagggtaaggtctaaaagcatttccaggtgattctaatgggcagccaatactgagaaccactgttcttatgtaagaagcacatcttacctatatttcctaggaagaccagttgatgaggtcatatgcaaaagttcccatttattggtttagtataattgtgcaaattagaattaacccctaagtgtataaagagtagagctggttaaaaacatagcctgtgctaagtttaattgtacagtaatttacatttgtgtggtacttccaagtttcccaaatgccctcatatttgttatccacctgtacatttaaaccaattcccagaggttagaaaaggattcttatcttatctgagagacagtatagcaccatggttaaaagctcagactctgacaccagacagtctgggtgcaaatcctggctctgctgttgccctcagacaggatttcttagcttctctgtgtatcagttttctcatctgtgaaaggaggatgaatataagaccttatgcgatgctaatgtaggattaaattccctactacaagaaaatggtcttagaacaatgcctggaacatggtaagtgctgtataagtgttaactattagtatgattcccatttgtttgatgcaggcagaagctggagcttggagttgctcagagtggtagagctgattttaacacagatgtttttgttctactaaactgcatcctcagaactcctatttactgctgtcagttatgttgaagattaagttatatggttgcaaaatatgtgtaaactgagaagataaaaggttaccttaaagtttcctttcaaatgttacttctttttttttttttttttttttgagacggagtttcgctcttgttgcccaggctggagtgcaatggcgcaatctcagctcactgcaacttccgcctcctgagttcaagcgattctctcctgcctcagcctcctgagtatctgggattacaggcacccaccaccatgcccggctaattttgtatttttagtagagacagggtttcttcacgttggtcaggctggtctcaaactcccgacctccagtgatctgcccgcctcagcctcccaaagtgttacttcttaactgatttcacataggccaaacaaagactggttaagagttgaggctctggaattgcactgtctggggttgactattgcagttgaccccacgaagtctgggtaaattatgtactttttttctcagttttcttgtcgataaaatgtggcaaataatttcatgagctgatacaagtaaggtcttacaacagtgctagataggtaataagcttaacttcataagggctagtttttatgctatttattggttcatggttagaggaggcctgggacaataagcagggcaggggacctagattctggcaaagtaaccaagtgatggccttgaccattctgggctctttaccccagtgtcatatgccagaggacccatcaccagacggcaggaccgggaacagggagggagttcatcaggcagaaggcccctgtggagtggtagtaccagcaactgaagaccaaatgggagctatgtctggttgctaatctccaggccaggccattcatggagatcggtggtcctgacatgcacactcctccccaagaccacagtggcacggctatttcccagcctgaacctggggaaatgaaggtgcaaatttcttctctgtggctcatggacccctggggagagagatcagaagatgttctattggacccctgtgcagcctccccacaaagcctgtatgtttccacccttttgccattgcagactccagggaacaccattggtcactcggctcttccctcttgtttcccaagtggtcagttgcttatgtggaatgcaaactctccttaattacttgcattagcacaaaccctggcttctttttgaacctaatctcaaaccttagtccaagtccctatcctaatactatctgtaatatttaagctattcctaaccttaatgctaaaattgtacttaaccccaaagtcaacctggttaataggcagaagttttaagtaacccttatacagagtctgccccttccccaccctgcatgtagtgatgtcatgcttactcagggctgcttctgtttcaaagaccttgatatctttgttctatgaccataactgtgaatggagacattggtgcttttatttcaaaccaaaaattccaaatgaaattgatacatctaatatcccaagttccactctggtcccaattgtatctcgaacttatccttaaacctaaccaaactcattatcataatcttccctaaacctcaacatgcttttcactccatctatcttcatctgtccccaaggtgtaagagaacccaggcctaaccctgcctccaatctggctctgtccccaaactgatcatatatcctttcctggttttatggatagccctctgcagcccctcttacctgctgcagtgtgttctctatgacccctgtgctttccatctgtcctctttactccagagctaactgtatggctatggctaaccagaagccgtcctggccaactgtgactgagtccctcaaggcaggaggaacatgttctggggaatttgaattgtgcaggcaccacccttgtcttatggattggattcctaagccaccttttagcaacccagacccttaggtagagggatgagatgtgaggcttctgctgcatcctttgaagactcccctggatacctgagccctacctgagctgctggggcagactggaaacctacctacagcgcagcatgcatgggggtgatggtgttctttttctcacattcttcttgggtcagatcttactcatctcttcaaaactcccctcctgcatcttcttgcttccacttacatgttatctcttaatgaaatgcactagttcatgatttcacttatgccacaaatatttatatttactgagcattcgctatgtgtcagatgctgagaaaacagcaaaggataagagtccagagcctcatgccctccagggtttcacagcctagctggaaataagtgttataggcttaagggaaaaggttacatactttttttcatttttgtaatttaatgttaactttattttaattttgaattaaatatttttattgatatgatttcatatttgaagttcaataaaagaaaatattcactttctgagtttttttctggaactactatttgtttcatttcatgattaccaaaaatgattttgtcaaatagaagaaacgaatgttaaaatgacctgctctggtatcaaatatacaaggtacaccactgctgaaaatatcagtcattgatttcatgatgggccagatggatactctgctgttcaaagtgttgggcttaaaggctccagtcccatggttacacaaagggcttggccaatcctcccctctctgccgtgaagctcaggctgccctggggaaatcagcttcacttctggcttctgccactcatctctgttttgtcctccctctagtggctgagcacggtgccaggttccagattccattgcttggagccatggccgcgacgctggtggtcatctgcacagcagtcatcgtggtggtcgcgttgactagaaaggtaatggctccggctgcacaccgcagtcatgggcacccccacgtctggcacccgggtcctttcaggttctctttccacccagagagagacccagatgtgatcttcccgagtgctctttgtgcctttttcctggcatttgttctgcctattagtgcagttatttatgctcttccgttgtccctctcatagggagggaccccctggacagctggacctgtttcctacccatcttgctgtcatttgtaactcctggtttctgcttatcccttaagccactgctctgagagtttaatttatctactatgattttgatgcatcgtgggcatctatatatgctagagctttctgcacattagctcttttgattattacaactctctggtagtgctaggttacccagcatgtctgtagaatgagaaataaacactccaaaaatgtagggttaggccaggagctgtggctcacacctcagaagccacagatatggctggtgctattgggaaagtcaatgatctgtaatattttcatttatgtgttggctatcacaatagacataattccacccactcgggagactgtggcgggaggatcacttgactctaggagttcaaggctgcagtgagctatgactgcactccagcgtgggcaacagagcaagactctatctctaaaaaaaaaaaaaaattggtggtaaagtgggcatggcaagatcagcaggttgtaaatcctctgtttagcttaagagcttatgtggctgaaagagtaatgaatggggaattgaaagatctagtttctagttttggcactgagtgtatgcttttaggaaagttacttaatctttcaaggtcttcatttccttatatataaaatggggatttgtcttagtctattttctgccgctgtaacagaatacaattattgggaaatttataaagaaaagaagtttatttggctcatggttctggaggctgggaagtccaggagcatggtgtatttggcgaggttcatcccacggcagaaggcatcatgtgatgagtgcatgcatgtgagagagagagagaaatgaggccaaattcatccttttaattaggaacttactcccatgatacctaacccactcctgagataatggcattaatcccttcatgagggcagatcttcatggcctaatcacctcttaaaagcattaccacttaatactattacaatggtaattaagtttccaacacatggccttttgggggacacattaaaaccatagctgtattataattcggcttactctatatcatagagttgtgatgaacaagtggcatatttcatgtaaaatctttataaataacaaagaattatatcagtgaaatttatgtcatcagctactggtattgattgggaggagtgaaagaatttccactccttgttttgtctgatctcttgggccctttaagtcagctcagcccaggtcaccttaattcaagtcaccacataaatattttgggaaacacaagtttgtaatttctacctttaccccagaccctccacctgagatcctaacccacttttcctccaactctaattccattcaattaacaactcagttctgcagcctggttgaactgcagtggctgagacatggctggtgctattgggaaagtcaatgatctataatattttcatttatgtgttggctatcacaatagacataatgaggaaatgaaccctctatgggaaggtgaggacaagagaaatgattgaatagaggggggaggtgaagaagatgaaagttgatctcttagctgggaagggagctgctatggtggttggtgaacaggttctctgctgttagcagtgtcctgatggtctggaataaaagaatcaaaggctctttagaaggagctgaacaacttttcctgttaaggattcaagactggttaattttcattctgggcacctggactaactttggtcatctggagggtagagaaagagaaaaaggtgaagagacctattgagtcctgttgctccctttctacagtgtttgattccccagccctctctgacatttccactgcttcctgtgtagtgtgggtcctctctgcatctttcctgtgctttggatatagttgtcagtcttctgtctctctctccttgctcaaagcattttatagttgcattattcagggttccagcagggaacatgtagtactcaaactgggttgtttgaagacagtttaataataggatttccagaagtctagtaggatgtaaggacaccacaaggaggagtagcaaggtgctgtaaccattcctagttcttcaaagggtaggggaggggctaattattggagcctggaaggagagagttatgtggaggggtctccttcagaagtgctgtagtctttgctggagggtcacaaccagtccaaggccaccctgcagaaagaacaaagggaactacataccctcatctcattcctctctccattcccctactgttgctttgcattggctgacctcaaacttaggatggaggataaggggactcattgatgtagtacatttagtacagtcttcatagggcacagaatagggtggagaaggttagagagcagagccaagaggcaaatggctggtatccattcaagtagtgctcatagacatgaacactggacaaaggatcttgactttccacagggttggctggcttcagccttctctcttgtagtcttgacctcttttgattatgtatgtaagcaatacccttcttggctgcccagctgtatctctcctgggcacactgtgctctattaaccattttaatattcccatggatcaggctttcttggctcccattgaagtaattacatccattttgtttctttaagtgctgctatctgttctgtactattttgggatctcctcatcctcattgctactaggaatccagttctgtaaaagcatctcctattttagccctagcctatagaggagagatgccaccaaacttctcaatgatgctggagctcccctagcacattcttttccagcttagtaaaagggatattctttttctttttcctttttcccctttattgttgctattatcttaagggatgttctctggatcttccctagaaaagtcaatataatcagctattggattttggaaattattcagtacagggattggcaaaatttctctgtaaagaggcagatagtatatctttttgggtttgtaggtcatatggtctctgttgcaacaattcaactctgccattgtagtgtgaaagtgctatagattatatacaaatgaatgactatgactctgttccaacaaacctttatttataaacactaaaatgttaatttcatataatttttatgtgtaataaaatattcgtttttctttctataaatttttatgttttaattttttatatattttttatttcaataggtttttggggaataagtcctttagtggtgatttctgagattttggtgcacccatcacccgaacagtgtacactgtacccagtgtgtagtcctttatccctcagccctctcccactcttttccctgagtccccaaagtccattagtcccttgtatcattcttaacgcctttgcgtcctcatagcttagctcccacttctgagtgagaacatacaatgtttggtttttcattcctgagttacttcacttatagtagtggtttccaattccatccaggctgctgcaaatgccattattttgttcctttttatggctgagtagtattccatggtgtgtatatatatatgtatatatatatacacatatatatgtatatatatacacatatatatgtatatatatatacatatatatgtatatatatatatacatatatatgtatatatatatatacatatatatgtatatatatacacacacacacacacacacacacacagacacattacaatttctttatccactcattgattgatgggcatttgggctggttccatatttttgcaattgcaaattgtgctgctttttgtataatgacttcttttcctctggatagatacccagtagtgggattactggattaaatcatagttctacttttagttccttaaggaatctccacactgttttccatagtcatactagtttacattcccacaagcagtgtaaaagtgttcccctttcaccacatccatgccaacatgggttatttttttattttttgattaaggccattcttacaagagtaaggtggtattgtgttttgatttgcgtttccctgataattagtgatgttgagcattttttcatatgtttgttggccatttgtatatccttttctgagaattgtctttttatgtccttagcccactttttgatgggatttttttttcagctgatttgtttgagttccttgtagattctggatattagtcctttgttggatatataatttacaaatattttctcccaatctgtgggctgtttactctgctgattatttcttttgctgtgcagaagatattactttttaaaactatttttgttttaaaaaaacacttaaaatataaaagccatctttagttcaagggctgtaaaaaaccagcagtgggccatatttgacccacaaaactcagtttgccatttctgatttagtaggtttattctctgagcattttgttccccttttccatagtttgccaaagcagtgttgtcatctctattgacagcagtatatcagaatcatctcctggggcccttgtgagggtgttaaatattgagcgttccaatattgacgcattatccctcatccaggcttatgttctaccccctaccacaatccatcaccttcagaattcatgcctaggcatcttctcccagtccctgccagtagatgttagccaggtcctgtagtatataacctttctattctcttagcagacccagcacttcctccattagcatgggctgagattttatcctaattacgggcctgatggacagtaggggaggcagaggcagggcccagcagggattcttttccatcaaggggaagtgggccacttctgcagctccagatggtataagagaagcaggtggttcctggctctcaaatgcatctttccagagatcctcattccaagtttcaggagactcctcctctactatcaagatgctagctttggcatagaaaatttacctaggcttagaatcagccttctttaaagtcctgtccctcttacaattagcttatgtacctggtcttcagctgtggatagacgagtgtcttttaaatgctgccaaggaggagctttaactctcacactttgagttgctgatagatctgaggctgtcattttctcacttcagtccatcggtgcaatttagcaaaagtcaattttgagtcctaatattaactattaccctatactgttgacccaattccagagttctaacactaactatttaccctatacacctcaaatgttagagtcagtgcaccagctcatagtttccatccatctgtgtcccatctcatttcaccaccagtcatggggtttgtgttgccatctagcaggtgaatgatcccattccacaatcctgttcttacaggctgccttctaggactattcccagcagcaactgttttagatcaggtccccggaaatagagcctgacatgcaaattttggtgagagtgacttattgggacagctctcagatgaaaagtagtgaaggaagcagtatagggagggctaagggaagaaagctcagcatggatatggtctcagctggagacttggctgaagcaagaattgtacagagtcggttgaacctttaggcagggagctggcattttggaaatccacctaggtcagtcattacttctggctgctcaccagcgagggcccaagagcaattctccagagaaggggctgctgtgagctcacagcgtacactcccagcatctggaaaatgggagtgctggtcaggtagagagatctgagcaggaactgtacattagttatgggtctccggagggacagaaccaataggagatatagatggatggatggatggatggatggatggatggatggatggatggatggttggatggatggatgggtgggtggatggatggatggatagatagatagatagatagatagatagatagatagatagatgaggagggatttgttaggggaatttgttcaggtgattgtaaaggctgagaagtctcaccacaggctgtctgcaagctggagaccttgggatgctggtagcatggctcagttcaagtccaacagcctcagaaccactgaggctgttggtgtaattctcagtccaaggctaagggcctgaaaacccagggtcaggagcactggtttaagtcctggagtccgaaagccagggagcctggtgtcctgatgtccaaggacaggatgagaagagtgtgtcccaactccaaagagagaaagtacaattttgcctctcttctgttttgggaaaggcaggcctccaggtgagtggatggtgcttggctacatttagagtgtatcttacctactcacttcactcagactgacatgccaatctcctttggaaacaccctcacagacacacccaaaatgggctttactagctctctcagctcccttaatccagttaagatgatacctaaaattagctatgacaggcacaacagcattcactacagaccttgagagcccatagactgtgttatttaggagcatgttctttggaatcagacagtcctaggtttgggtcccaactcaaccacttgagtagctgtaccacctaactttgatgaacctcagttttctcatctgtaaaatgccgataattatggcattgccttcataaggtcatgagaaaacttcagtcaaataataattaatgtaaggcacttagcatttttcctagcatgtaagctggaaaggtgagtgggaccatcacaagggatgtttttgggatcatcacaagggatgttttggggatcatcacagtttcttatgaggaatgtagtgaaattatggattttcttcttgggcaaaattttctatacaatttacaaatcccctgaaatccagctgtgcatctcaggttaagcaccctcctatatacagtggagccattgaagagttttaggcagaaatatggactgacacaacttttgtttttgaaaatcactctgctggcgaccatgtggagttggactagaagtaagagggagtccagagacagtgaggatgaagcccaggtgtgagagaagacatggatatagagatggaaaagagggagtagatttcagaactgcctaggattaaaattggatgaagttttacagataaattgagttgaacattagcctccagatttctgctcagctggtgccataaaccagggcagtgaatataggggcaggagtggtttgttggggcaggaatgtgatggtgtcgtttgagacaatttgagtctgagcttgccgtgggtcatcaggtgatgatgcccagtggacaggtggacacctgcatctggagctcagggcagaagcctgggctagtttagatagagatttgggcatcttcagaggacagatggtggttgtagatgtaagaaagtagatgctcatgaaatcactcagagagcatgtttagcgtgagagaaagcagagagcagaaccctggggaaccccacggtttggggagctgatgtgcaaagagaaaaggggcaggcctggctgaagacgaaggtgggggttcaaaggaggagaagaaaatcaggagagagtgatgccaaaggatccagagaaagagaacatttcagaaagtaagaggtcgacagagtcaagtgcagtaaacagtacaagaaaatagagaatggaaagctgcctcactaagcttagtgaacaggaagtaacaaggtgtgtggcacgtggtatatgtagtaagtgcagtttccatggactagttagcatttaaatctagctgtaacgcggttgagaaattaagggctaaggaattggtgttggtaagaacataagtttgctggtgtgcatgtgtgtaagaaaggaagagagagatgtcatattggggattaactgttgaataacatccccacatactcactttgtagtttgtttgtttttagaagaaagccctcagaatccattctgtggaaggtgacctcaggagaaaatcagctggacaggaggaatggagccccagtgctccctcacccccaggaagctgtgtccaggcagaagctgcacctgctgggctctgtggagagcagcggggagaggactgtgccgagctgcatgactacttcaatgtcctgagttacagaagcctgggtaactgcagcttcttcacagagactggttagcaaccagaggcatcttctggaagatacacttttgtctttgctattatagatgaatatataagcagctgtactctccatcagtgctgcgtgtgtgtgtgtgtgtgtatgtgtgtgtgtgttcagttgagtgaataaatgtcatcctcttctccatcttcatttccttggccttttcgttctattccattttgcattatggcaggcctagggtgagtaacgtggatcttgatcataaatgcaaaattaaaaaatatcttgacctggttttaaatctggcagtttgagcagatcctatgtctctgagagacacattcctcataatggccagcattttgggctacaaggttttgtggttgatgatgaggatggcatgactgcagagccatcctcatctcattttttcacgtcattttcagtaactttcactcattcaaaggcaggttataagtaagtcctggtagcagcctctatggggagatttgagagtgactaaatcttggtatctgccctcaagaacttacagttaaatggggagacaatgttgtcatgaaaaggtattatagtaaggagagaaggagacatacacaggccttcaggaagagacgacagtttggggtgaggtagttggcataggcttatctgtgatgaagtggcctgggagcaccaaggggatgttgaggctagtctgggaggagcaggagttttgtctagggaacttgtaggaaattcttggagctgaaagtcccacaaagaaggccctggcaccaagggagtcagcaaacttcagattttattctctgggcaggcatttcaagtttccttttgctgtgacatactcatccattagacagcctgatacaggcctgtagcctcttccggccgtgtgtgctggggaagccccaggaaacgcacatgcccacacagggagccaagtcgtagcatttgggccttgatctaccttttctgcatcaatacactcttgagcctttgaaaaaagaacgtttcccactaaaaagaaaatgtggatttttaaaatagggactcttcctaggggaaaaaggggggctgggagtgatagagggtttaaaaaataaacaccttcaaactaacttcttcgaacccttttattcactccctgacgactttgtgctggggttggggtaactgaaccgcttatttctgtttaattgcattcaggctggatcttagaagacttttatccttccaccatctctctcagaggaatgagcggggaggttggatttactggtgactgattttctttcatgggccaaggaactgaaagagaatgtgaagcaaggttgtgtcttgcgcatggttaaaaataaagcattgtcctgcttcctaagacttagactggggttgacaattgttttagcaacaagacaattcaactatttctcctaggatttttattattattattttttcacttttctaccaaatgggttacataggaagaatgaactgaaatctgtccagagctccaagtcctttggaagaaagattagatgaacgtaaaaatgttgttgtttgctgtggcagtttacagcatttttcttgcaaaattagtgcaaatctgttggaaatagaacacaattcacaaattggaagtgaactaaaatgtaatgacgaaaagggagtagtgttttgatttggaggaggtgtatattcggcagaggttggactgagagttgggtgttatttaacataattatggtaattgggaaacatttataaacactattgggatggtgataaaatacaaaagggcctatagatgttagaaatgggtcaggttactgaaatgggattcaatttgaaaaaaatttttttaaatagaactcactgaactagattctcctctgagaaccagagaagaccatttcatagttggattcctggagacatgcgctatccaccacgtagccactttccacatgtggccatcaaccacttaagatggggttagtttaaatcaagatgtgctgttataattggtataagcataaaatcacactagattctggagatttaatatgaataataagaatactatttcagtagttttggtatattgtgtgtcaaaaatgataatattttggatgtattgggtgaaataaaatattaacatta

SEQ ID NO: 20 - DNA, 110281 bp, Homo sapiens
ttcctgtctacgtttcatttcctgggggcttgccaagtgataaacagacccaggcgtgtgtggtagagttcgggttttttagcacgaagtgggtggctggagtttgcttgaaaacatcaattgactttgtgatcattacagaaatgctggtgtaaggtgttcagaagacaatggagaaaaaatggaaatactgtgctgtctattacatcatccagatacattttgtcaagggtaagacttccagttgtcccttcttgtcggatgggccgctttaggggcggatggggcctctgttcatttaaaatgccttgtgactgctgctgaaattgatcaccaaaggacaaatcattactaagggtttcagttatgtatttaagcggcaggtataagagagatgctagaatctagaaatgattactaatgaacactaaaaataagaagggaatgggtcatttgtgccactgctctgaggcattttcacccatttcctttctaacaggatctctggagtaattggcaaattgtgtttcttggaaatgaaatgctctccaaatggtagccaaaacaactgcggaaaaattaaaaattacaaagccatcaacgctcagagatccttgtttaacttttttctctctcaagtactctctttcttttggatataacaagtatttctcatccaaatactaaggtctttgggagttgaaaacacgttgaattttaatgaggcatgtgtaggtatgaacctgggagacaaagtggaatccttatgacagtgggaacgagagcctaatgggcctatttaaaaagagaaggaagcaagattagttctgtattccacagtatgagagtatcatagtaagcctgagtgtcttaagaattaactgtgcttttcagacatagctatgaaaatattaaggagaatttctaaatcaaaagagatttggaatataatgctgtagataggatcagagccatattttcaggcaaaggatagctcacaggaagttacattaaactgtactaacctctgcctaccaaacttttgcatccacagaagtatgataattcccatttgtcaagtacttttacttttaagaggcttgtttcttctcagttgcttgtcatctttttatcttttccttttgtgagcttcagtggtacttgtcacaataatatatatcatttctgtaacaggattccatgttaattctaaaactgaggccaacactattgaaggcatgtcacagtctcaatgcttaacacattttaagtgtcctgtatcactcagtcagactgctgatgggaaagagactctacttatgtctagtatttcagaccatcgattagaggtgatactaagtggaacctctacctaaggttagatgaggtcctttcaatccttgtatattgaaagtgaaatttcttactctaatcaactagactgaatttgggagacagtttggaagttatgtggaaggaaaataaaataaaataagtaataataaagtttaaaataataagcataacataggtaatagttaacattaagtataggttacttagaagttatatgtaggctaagaaatttaagtagcccctcccagcattgctaacaagttgcagctgtgagcttatctcaaccttccaagcttcttgcctgcccccagacccccacatatttctgtaactcctgttttaccttaccccatctctgtctagcttcaagattgactggttaagataactaaattgtaagttttctcagaattgtcacgggttaaataatttactgtctttgcctgaaacctgtatcctgccttgttttcccacctcaaacgacatataagcaagcctgctttctttgtcagagtcagcagccattttgggcatgagtctgctgtgggcctggatgcctgaattaaataaagttctctttggtctctaaaggtctctttgtcttccttggctggagttttactgttatacttatgagggttatagaaagaccacagactctgggcaactgaattcattcttttactggaggtgtgactttttttgttttgtttcgtttttcgtttttttgagatggagtctcactctgttgccaggctggagtgcagtggcatgatttcggctcactgtaatctccgcctcccaggttcaagcgattctcctgcttcagcctcccaagtagctgggactacaggcgtgcaccaccacgcccagctaatttttgtatttttagtagagacggggttttgccgtgttggccaggatggtctggttctcttgacctcatgatctgcccacctcagcctcccaaagtgctgggattacaggcgtgagccactgcgccaggcctggaggtgtgactttgagcatactgtttcatctctctgtggcccagtttcttcctcataaaaaggggttaacaacatcacctatggcgtgtgagggggattaaacaagataagatatgaaaggcccttgtaaacatgtatttttcaaagaaattgctatacacatatcatttatttttgcagtttcagaaagcatcacgtgtgtattatattcagctgtcgttttataacccaaaaagccaattatattaaacgtaagaagaatcgtcatactaagtttgctggtgtgcttcaattttcaaataggcttaattttattcacaggtagtctgaaaccttcaattatattttggtcagaccaacacatagataaatatttagaagtcagtaattacctctagcttctctacgtaaatgcctcctcatttatattgtctcatgcatctctatctgagtgagacacaagctctactctattcctaaagcagccagggagaaatttcctcagttgctcccctcaccttactgaagtgactagggtttttaattaagcgtcattctatgtgaattatttaaactcatggctcatgttctttcttttcaggagtttgggaaaaaacagtcaacacagaagaaaatgtttatgctacacttggctctgatgtcaacctgacctgccaaacacagacagtaggcttcttcgtgcagatgcaatggtccaaggtcaccaataagatagacctgattgctgtctatcatccccaatacggcttctactgtgcctatgggagaccctgtgagtcacttgtgactttcacagaaactcctgagaatgggtcaaaatggactctgcacttaaggaatatgtcttgttcagtcagtggaaggtacgagtgtatgcttgttctgtatccagagggcattcagactaaaatctacaaccttctcattcagacacacggtaagcataactggtagagggatgtgctttcattcagctctctctcattcaacaaatgtacattttaagaaaagcaaggttaggcttggtgctcagcatacaaaggttgagcagaaagagctactgtctgataagagagacaggaagtgaccacagcatttaagtaaataaatgtaaacttgcaacagtgataagtgtcgataataaatactgtaacagtcttgtgaaggagcacatcacagaggccattgaaattgtcctttagaaattaacaccatagcttaagtctaaagaatgagtagacactaccacaatttaggaggtggggctgaggcagagtgggattgtgagtaatcccagagagagaaaagagcttgcatgaagctctttggagtgtttgaagaaatgggaaaatgccagtgggacagcaatacagcaattaaaggataaggcaggtaaggaccagatcatgttggacctggtcagcttcccttttaaaaggtttctattttgatctcagaaccataagaagacatggaagtatttccaacaaaaggatggcatgacatttataggctgactgtatttgtgttgtttaaaaaaaaaaagtcatactgactttcatgtgaaaatgaggtgaagatggacaagaaggagaaggtagagacaactcaggagaccacctcagtagcccagaaaagagagagtggtagttcaggtagatatagaaggaaaatggcaaattttgttcattgggcataaaacagatatgatcatagagagaatataagacaagggcagtatgaaggaaggagagaaagaagttaaaggtgacatctgggtgtctggcatgcacacctgaatggtggtgctattcactgtgatggaaggtaaaggaaggtttgtgggtgaatttatgaaagtgattctgggtatacaatatttagtctagggcaggtaaagggacaaaggaagctgctaactatgaagcattcacaccaaacatactttggaggcctgcatttagaagtgggaatcctagatttaagttctagctcctttctgaatagaaataaaatttgacttggggcctgtggtgtaaattctctgagcccatttggaaaatgattataataatgcctgccctaaattacctggtcctaaagtaaatgattttcatttctgctaatggaaaacaatgaaagtgaaagccaacagatgcaaaatgcactggcagtggactggttctaactcagggcaaagtggcctggtaatataagaaaaaaaaataactcgtgaaggtcatattaaagggggcatagagctgtccagaacaagcaacaggtatggatttatagcctcctctccatgtcttataacttacttgctttaaaaatatgctgttggaacagtccacctataggccaaggtcccatcaactactatcttataatgcccaattcccttgctgttttccaggaggaaaacacaccacacacacacacacacagacacatacacacacacacacacacacacacacacttcagttcaattaaggatggagtggagtgggattgaagtaaagagaaatggaagacctatatagaaaactgtttagctatacatagtttgattcaggtagcctgtatttggatattggctctatcatttaccatacgtttcatcattcccaagttgtttcaagtttcttacataacaaatatggataattatagtgctttctttacaggtatcactagcttggtgattaaatgagataatctgtgtaatgcacttaaacatatagttcctgctaaaggataagagtttggtaaatggtagttttcaattaagaatagtaataattatattgagcaaattctatttctcagttccaattaaatatgagccctgctccttctttttatatattgacctcatttggaacccagtaagacatttgccatgtaatgttagtacaagtacacattgaccttggtttcatacatagttttttttgtacattctgcctgaaccagtaaacaatactattgcctcacggaggactcagtgtttccttcattgagacttggcaacatggactgatgtaccttataggaaatagaataagtgatgccacaaaatgaagacagcaatggagaacagatagtatattatccagaaaggaggatgatgttgcctttaaagaaatgtatttcttaaaataaagagaaccaagggagttaagcttgtagctactaaaaactgcaggtcactggagaggcagaaaccgtatctatactttttgcggttggaaaatttccggtcttctgaatgtaactttgctgctgtcatctggatcagatgaaaagcaatggcctcagtgttagagaaatggttctggtattgtgattttgggtacaaagggagtaaaatagaaaagagcaaaacagaagggggaaacatccttcaccacagagtgaccacaaatgtaagcctggtacggagctacagagtaggcagctgactaaagggaggcagttgccatctgagagctctgtcaagttcacaaccaatagcatattttctttctaccctttactgttttgatcttctcttgcttcttctcctctcacttgtacagttttcttcttatgcccctgtgcaatctttaagtttacaagctagttgggtaagcaaaacacacctgaagtgcaaacacttatatagtacataaacaaatgcaaattgaagtggtgcataagaacctaatttgaaaatgctgagggacttgaagtgtttgagttgatcatctcttcctgtttcttttctgttgctgtttgagtcattctctcttgtctgctcacaacacagtgtgtgtctaaatcctgttcccatgttccccaagggcctagctgtgaaaggattctgttctcttttcacaatattttgtctctgtgtgtgtcttagtgctctgagattgtggacaagagtggaaatataataaacagtgtgaggtttgcctctttttcgctttcacttgacagagtttcctcctaggttaggagattttcagtcactccaagaaatgcagttctctgagttaagccttggattgtcataatctagatttcattcatttgaatgctactggatcccataatgcttcagattgtaagattttggtgcattttaaaatttgtagttattaagatcagttataagagtataacatggctttaatttactagttcacagtaaatgccttggtgggctgttaatgttattggaagcagtagtagcagtgaatgcggttggagaagtcatggtcctggaagtagtagtaatagtagcaataaaattttgatactacaatgttgataagcttggtctaaaacatgttgttatcctgtctagtttgtattgagcctgaatgctggctcttcttaaattcctgtatttagtctttatccaacaagtgtttttgagtgcttacagtgctagacactgggcactaggcacagagtaggcatatatgcatgactgtgtcttcatgaatcacaaagttcaataggaagaagttgacattcatcaaataagcaaacaaatatcaaattgcaacagtgagaagtgcttcagaagtgaggaagtagtgtatgagagggtataataggaaaatcagaaaagactttctttactttgtcctttcctttcccttcccccttattttcatttccctctcttctcccctcccctctcttcccctcccctcccctctcctttcctttcctttggaagcgctgcttcaactggagttaaccaagtgaacacagagctttacaaagaacaggacatgcaaaggttctatgggggaaggaagttataacaactgggtaggcaggggagattttaaaaggtattatggctggagcagagggattacaggtgaggcagttgacgataaggttagaaagattgattagtccatttaaggagttttgtctttatcctaagagctgtgggaactaattaaaaggtggttgttttgtttgattttttttgttttgcatttcaaaaatgcatctttgtggttcaagtgtagagaatgaattggagaaggcagagacgatagtgtggatcagttagaagacaacagcagaaagctacatgagagatgctggtaccattaagtacagtggcaatgaactagaaatagaagaatgtttagattagaaacttgtgtaggagattctccccacaggatcagtggtggattgcctacgtgaaggaaggaataaaaagcagcgtcaaggatgatgctttaatttctaatatgtgacacagaaaaaataggggaacattgtattagggaacactggaagatgatcagatcatacagaaattattttgcatttaatcttatagatgttgagttaggcatgaagttgtgacatacagaagacgttaggtaaactggatatacaatttcagatctaggagagaggtttaagctgaagatacagagtcatctgagtgtgagtgttaactaaaattctgggagtgaaagaaatcctctaggaagagaaaatcaagcaagaaaagccatgtggcacttcagcagagtccatggtgacggatggagaaaggtgagtcttcagaggataatgaagagcaattaaagaggcaaaagtagaatcaggagtgaattgggtcacaaaaacctggaaacatattacataaaaggaatagccatcaattataaagtttctaagaagataaaatagttattcgaatgtattttaaaacatgaagttttttttatcacctaacaggaactgtttgatggcattatggaatggaagtcaggctggagggagaagaggaatgagtgggaggcaaggaaatggggacagcacattgatatgactttcaagaaatctgccagtagtaataggaagagtagatagaggtgttcaaatgcgggattctgttgatactacagtagtgatggtggtggtggtttcaattaataagaaacacttgactgtgcttcaaagttaatgggcaggatctagttgaaaaagggtagttaaatacacagtatggaagataaaataataaaccaaggtttctaagaaaatggggacaatgatactcacaacacaagtaggactaccccgatattgaaaaaaaaagaacagtttttttttattgtaacaggtgggagggaaaataagatgagtgcatatgatgagggaggtgctgtcttctatttctctaaaataggaaacaaaaccatcttcagctagagagaggaaggaagcttcagaaaagaagattgaggaaggtttgaaacagctgctatggatagaagggaaatggattcactaagttaacacatttggatttttggtctgtgttgaacatccatttgggtatggtatgaaatggtagtgaaaacaattcgcacaaggctttctccagcagtgattggctgcttgagtctgggcattaaaaagtacatagtgccacatttggattcctttttagattgttgccaaaaggaaaacaaaaaggcaaaggatttggggtataagcaaaaatattattgacataatgcactatagaactttagcttgataataagagatgcaaagaaaaaataaagctggtgatttggaaaaaagtagagtgattaactcattaaaagaccaatgaggttggagaacagttgaaatgaaactggttgcacaaactggaagaagagatgtttgtaggtctgaatttgtgattttgtagatgagctattttacatgataacaagatccaagatgtgattgtgagagtagatggctaaaatgaagtggagacaattaatgaagatgacagtgggaagaactgagagtccaggtattggagaagtcatctgcatggtcactgaaagcacctaggttatgtcaggtttggggctgcaaaatattgcagtctacataaaaacattttcaaagaaaaacggagtgtgattgggagattacagcagaagttgacaaactttttctctgaagggtcatgctaagctttgaatatttgtccccttcaaaatcattttgaaatttattgtcattgtaacagtattaagacatgggaccttctttttcttcaaattttaagttcaggggtacatgtgcaggatgtgcaggtttgttatataggtaaatgtgtgccatggtagtttgctgcacagatcattccatcacccaggtattaagcccagcatccattagctattcttcctgatgctctccttcaccccaccacaccctccgacaggccccagtgtgtattgttccccctcatgggtcagaatgatttataacagaatgatttatattcctttgagtatataccagtaacgggattgctgggtcaaatggtatttctgcctttaggtctttgacgaatggccacactgtcttccacaatggctgaactaatttacactcccaccaacagtgtaaaagcattcctttttctcagcaacttcaccagcatctgttctttcttgactttttaataatagccattctgagtggtgcaagatgatatctccttgtagttttgatttgcatttctctaattatcagtgatgttgagctttttttcatatttgttggctgcatatatgtcttcttttgagaagtgtctattcatgtcctgtgcccactttttaatgagtttgttttttttcttgtaaatttgtttaagttcctttgtagacactggatattagaccccaggccctttaagaggtgatataagggctccactctcctggaaaagatttgtggcaatataaaaatgtgtgtttgtccccctcttttctctctgtggctcttctgctcttctgccatgtggggagcagcattcctccctccgaggatgcagcattcaaagtgccatcttgaaagaggacaggacactgggctctaaccagacaccaaacctgccgatgttttgatcttggactttccagcctcaagaactgagataaacaaatatgtcttttaataagttacctaatctcagatattcttttgcagcatcacaaaacagactgaaatagtccaaatactaaatattttaggctttgtggtccatgtagtctctgtcacaactactcaactctaccactgttgcataaaaagcatcacagagaatatgtaaatgaatgggcctgactgtgttctaattcaactttatttacaaaaataggcaacaagccagatttggcccacaggccaaggtttatgacctctgagttagaggataatagcagtgaatcaaggaagaaagggattgttttgtttttcttaaaatatgttgctcataactgacaatactggtactggagatggttttaggtgattcatgaaacaactataaaagctttaattgtggaaaactctaaacaatatacaaaaaatacatagaataattatgaaaattatatagaataatttcccacatactgaacatacaacttcaacaattatcaactcataggcaatctcattttatttaaacccttatcaactgctgccttccaagattactttggagaaaatgcaagacttcttgtttattttagtatgaatctttaaaagataaagatgtcattaaaaaaaagccataatctaccaccaaaactaaaaaaaaattagtatttaatattattcaatatcccatcagcctgatgttatattttgtttttttttttaaattaggatgcagataaactagatatattgtgattatttggaaattcccttttaatctgaaagctatattacatttgttatttttcctttgcgatatatttgttgaataaatttgatgatttgtccagcctggattttgctcttatagtcccatagtatctctatgttttcaccttatagttagacttataaactctaagttatcttatattcttgacagagacttgataacatttaggttttcttttttctttttttttttttttggcaagactacgtgatagatgatgcatagttatatgagaggcacataattctggttacatgatattaagagccactggtgagccttgcctacatccattaaatcattatgatttgccgaatagaaatattctatcattccctaatttattagcttaagtatttctataaagagaaacttcctctcatcaacttattatttatttgatgtatagtttgtataagaaaagcagaatagatacttgattctttccctttaatcaccagttttaaaaatgagttggttaactagtatttttagaaagtgacccgtaagtattttatgttaagtatcatgaatttatatgaacttaaacatactgatgaatttcaattcattacggttattatccttattttactgaaaatttcccatatataaaacctattaatcctttgttatataagttgcaaatattttcccagtttgtcatttattcttactttcttatattgtttgcaatgcagcatgtttcttatttttattaaataaaatctattactcttttcccttattggtcctgattttaagttttggtcaagaaaagttttcttcatttccaaattatataagaattcactcataatttctgatacttgcatgctttcttttatgagcatttaaatttgtaacattaggtttctggtgcaaaataaaaacacctaaatttacatttttatatatctctaatgccttcttctatattttctactttttttcccttctgtgattcaattaggtattcacctgtcttccaatcatgaactctatctctatgatgtccaataagtttttaccccatcaaattagttcttaatttctgatattgtatttttaagttatttgatcacatttgatagatttttaatttttgataaatttgtccaccttttgatctacttcctccatttcttctctgttttcttgactatatgaaaaagagttattttaaatctttgttggataactccaaagtcagaagcatttgtttgtctgttcctatgtctatttttctcttattttctttttttgcaacttgctccaccgtatctcctctaaaccactctgtattactaaatatactgcatctatatcaaactataaagtacacgtatataataatatatgtattaaactcaacagttcagtgttaaattaaggatttaaagcagcagtacccaactttttgacactaggtaccggcatggaagacaacttttccatagactgtggtggagggggatggtttggggatgattcaagcctattacatttattgtgcactttatttgtattattattacattgtaatatataatgaaataattatacaactcaccataatgtagaatcagtgggagccctgagcttgtcttcctgcaactagatggtcccatctgggggtgatgggaaacagcaacagatcatcaggcattagattctcataaggagcacacaacctagatccctcaaatgtgtaattcacaatagagttcgcactcctatgaaaatctaatgcagccactgatttggcaggacacagatctcagatggtaatgcaagtgatggggagtagctgtaaatacagatgaagcttttcttactcacacactgctcacctcctgctgtgtggccccattccttaacaggccacggacaagtaccagtccatggtccaggggctaagaacccctgatttaaagaatttcatgttctttaacaaaattaagagaaaagaaaagaaaaataaatgtatgtatagtttttatttactcacatatgaagactacatatataatttttcatatttactcacgtatttaccattttttgtgctctttattttatcccatgaattggagttactgtttgttgtcatttcttttcagcctgaaggactttagtatttcgtgtaagacaaatctacttgcaatgaattctttcagattttttcatttttaattttaaaggataatttcaatggatatagaattcagagtggattgtttctctttcttttagcattttgaatatatctttcgatcgccattatttctgattaaaatgagccactagttatattattagtctgctgaatgggatgagcttttgtttttgtttgtttggttggttggtttttgctcctttcaattgctacttttataatttagtctttctttttggcttccagaagtttgattatgatgtgtcttttggctttcagaagtttgattatgggtgtctctttgtgtttgtcctattcaggttttgttaaagttcttggatgtgtagattaattttaagaaagtttttaaataatcaaatatgtgaagtttttggccattttttcttcaaatatttgatccatccccttactctttcacttctttttctactactcctgtttcatgtatgttaccatacttgatactgtcctatatggctctgaagctgttttcatttctttcaatcctttttctcccttgagattagataatttatattgaacaatgttcaaatacactgattctttcttcagccatctcaaatttgctattgagaacatctagtaaatttcttatttttgctactgacatttcaactctaaaatatacatttgcttcattttatagctttctatttctctactaacatttcctatttattgagtcattgtcatattttgctttaatactttgaatagactaataacaacttcttttttttttattatactttaagttttagggtacatgtgcacattgtgcaggttagttacatatgtatacatgtgccgtgctggtgcgccgcacccactaactcgtcatctagcattaggtatatctcccaatgctatccctcccccctccccccaccccacaacagtccccagagtgtgatattccccttcctgtgtccatgtgatctcattgttcaattcccacctatgagtgagaatatgcggtgtttggttttttgttcttgcgatagtttactgagaaagatgatttccaatttcatccatgtccctacaaaggacgtgaactcatcattttttatggctgcatagtattccacggtgtatatgttccacattttcttaatccagtctatcattgttggacatttgggttggttccaagtctttgctattgtgaataatgccgcaataaacatacgtgtgcatgtgtctttatagcagcatgatttatagtcatttgggtatatacccagtaatgggatggctggctcaaatggtatttctagttctagatccctgaggaatcaccacactgacttccataatggtggaactagtttacagtcccaccaacagtgtaaaagtgttcctgtttctccacatcctctccagcacctgttgtttcctgactttgtaatgattgtcattctaactggtgtgagatggtatctcatagtggttttgatttgcatttctctgatggccagtgatgatgagcattttttcatgtgttttttggcagcataaatgtcttcttttgagaagtgtctgttcatgtccttcgcacactttttgatggggttgtttgtttttttcttgtaaatttgtttgagttcattgtagattctggatattagccctttgtcagatgagtaggttgcgaaaattttctcccattttgtaggttgcctgttcactctgatggtagtttcttttgctgtgcagaagctctttagtttaattagatcccattcgtcaattttggcttttgttgccattgcttttggtgttttagacatgaagtccttgcccatgcctatgtcctgaatggtaatgcctaggttttcttctagggtttttatggttttaggtctaacgtttaaatctttaatccatcttgaattgatttttgtataaggtgtaaggaagggatccagtttcagctttctacatatggctagccagttttcccagcaccatttattaaatagggaatcctttccccattgcttgtttttctcaggtttgtcaaagatcagatagttgtaggtatgcggcgttaattctgagggctctgttctgttccattgatctatatctctgttttggtaccagtaccatgctgttttggttactgtagccttgtagtatagtttgaagtcaggtagtgtgatgcctccagctttgttcttttggcttaggattgacttggcgatgcgggctctattttggttccatatgaactttaaagtagttttttccaattctgtgaagaaagtcattggtagcttgatggggatggcattgaatctgtaaattaccttgggcagtatggccattttcacgatattgattcttcctacccatgagcatggaatgttcttccatttgtttgtatcctcttttatttcgttgagcagtggtttgtagttctccttgaagaggtccttcacatcccttgtaagttggattcctaggtattttattctctttgaagcaattgtgaatgggagttcactcatgatttggctctctgtttgtgtgttgttggtgtataagaatgcttgtgatttttgtacattgattctgtatcctgagactttgctgaagttgcttatcagcttaaggagattttgggctgagacaatggggttttctagatatacaatcatgtcgtctgcaaacagggacaatttgacttcctcttttcctaattgaataccctttatttccttctcctgcctaattgccctggccagaacttccaacactatgttgaataggagtggtgagagagggcatccctgtcttgtgccagttttcaaagggaatgcttccagtttttgcccattcagtatgatattggctgtgggtttgtcatagatagctcttatcattttgaaatacgtcccatcaataccgaatttattgagagtttttagcatgaagggttgttgaattttgtcaaaggctttttctgcatctattgagataatcatgtggtttttgtctttggctctgtttatatgctggattacatttattgatttgcgtatattgaaccagccttgcatcccagggatgaagcccacttgatcatggtggataagctttttgatgtgctgctggattcggtttgccagtattttattggggatttttgcatcaatgttcatcaaggatattggtctaaaattctcttttttggttgtgtctctgcccggctttggtatcagaatgatgctggcctcataaaatgagttagggaggattccctctttttctattgattggaatagtttcagaaggaatggtaccagttcctccttgtacctctggtagaattcggctgtgaatccatctggtcctggactctttttggttggtaaactattgactattgccacaatttcagctcctgttattggtctattcagagatgcaacttcttcctggtttagtcttgggagagtgtatgtgtcaaggaatttatccatttcttctagattttccagtttatttgcatagaggtgtttgtagtattctctgatggtagtttgtatttctgtgggaaaggtggtgatatcccctttatcattttttattgtgtctatttgattcttctctctttttttctttattagtcttgctagcggtctatcaattttgttgatcctttcaaaaaaccagctcctggattcattgattttttgaatggttttttgtgtctctatttccttcagttctgctctgattttagttatttcttgccttctgctagcttttgaatgtgtttgctcttgcttttctagttcttttaattgtgatgttagggtgtcaattttggatctttcctgctttctcttgtgggcatttagtgctataaatttccctctacacactgctttgaatgcatcccagagattctggtatgtcgtgtctttgttctcgttggtttcaaagaacatctttatttctgccttcatttcgttatgtacccagtagtcattcaggagcaggttgttcagtttccatgtagttgagcggttttgagtgagattcttaatcctgagttctagtttgattgcactgtggtctgagagatagtttgttataatttctgttcttttacatttgctgaggagagctttacttccaactatgtggtcaattttggaataggtgtggtgtggtgctgaaaaaaatgtatattctgttgatttggggtggagagttctgtagatgtctattaggtctgcgtggtgcagagctgagttcaattcctgggtatccttgttgactttctgtctcgttgatctgtctaatgttgacagtggggtgttaaagtctcccattattaatgtgtgggagtctaagtctctttgtaggtcactcaggacttgctttatgaatctgggtgctcctgtattgggtgcatatatatttaggatagttagctcttcttgttgaattgatccctttaccattatgtaatggccttctttgtctcttttgatctttgttggtttaaagtctgttttatcagagactaggattgcaacccctgcctttttttgttttccatttgcttggtagatcttcctccatccttttattttgagcctatatgtgtctctgcacgtgagatgggtttcctgaatacaacacactgatgggtcttgactctttatccaatttgccagtctgtgtcttttaattggagaatttagtccatttacatttaaagttaatagtgttatgtgtgaatttgatcctgtcattatgatgttagctggtgattttgctcgttagttgacacagtttcttcctagtctcgatggtctttacattttggcatgattttgcagcagctggtaccagttgttcctttccatgtttagcgcttccttcaggagctcttttagggcaggcctggtggtgacaaaatctctcagcatttgcttgtctgtaaagtatttaatttctccttcacttatgaagcttagtttggctggatatgaaattctgggttgaaaattcttttctttaagaatgttgaatattggcccccactctcttctggcttgtagggtttctgccgagagatccactgttagtctgatgggcttccctttgagggtaacccgacctttctctctggctgcccttaacattttttccttcatttcaactttggtgaatctgacaattatgtgtcttggagttgctcttctcgaggagtatctttgtggcgttctctgtatttcctgaatctgaacgttggcctgccttgctagattggggaagttctcctggataatatcctgcagagtgttttccaacttggttccattctccccatcactttcaggtacaccaatcagacgtagatttggtcttttcacatagtcccatatttcttggaggctttgctcatttctttttattcttttttctctaaacttcccttctcgcttcatttcattcatttcatcttccattgctgataccctttcttccagttgatcacattggctcctgaggcttctgcattcttcacatagttctcgagccttggttttcagctccatcagctcctttaagcacttctctgtattggttattctagttatacattcttctaaatttttttcaaagttttcaacttctttgcctttggtttgaatgtcctcccgtagctcagagtaatttgatcgtctgaagccttcttctctcagctcgtcaaagtcattctccatccagctttgttccgttgctggtgaggaactgtgttcctttggaggaggagaggcgctctgcgttttagagtttccagtttttctgttctgttttttccccatctttgtggttttatctactttcggtctttgatgatggtgatgtacagatgggttttcggtgtggatgtcctttctgtttgttagttttccttctaacagacaggaccctcagctgcaggtctgttggaataccctgccttgtgaggtgtcagtgtgcccctgctgcggggtgcctcccagttaggctgctcgggggtcaggggtcagggacccacttgaggaggcagtctgccggttctcagatctccagctgcgtgctgggagaaccactgctctcttcaaagctgtcagacagggacatttaagtctgcagaggttactgctgtctttttgtttgtctgtgccctgcccccagaggtggagcctacagaggcaggcaggcctccttgagctgtggtgggctccacccagttcgagcttcccggctgctttgtttacctaagcaagcctgggcaatggcgggcgcccctcccccagcctcgctgccgacttgcagtttgatctcagactgctgtgctagcaatcagcgagattccgtgggcgtaggaccctccgagccaggtgtgggatatagtctcgtggtgcgccgttttttaagccggtctgaaaagcgcaatattcgggtgggagtgacccgattttccaggtgcgtccgtcacccctttctttgactcggaaagggaactccctgaccccttgcacttcccaggtgaggcaatgcctcgccctgcttcggctcccgcacggtgcgcgcacccactggcctgcgcccactgtctggcgctccctagtgagatgaacccagtacctcagatggaaatgcagaaatcaccggtcttctgcgtcgctcacgttgggagctgtagaccggagctgttcctattcggccatcttggctcctccccgaataacaacttctttgaagtctcttaaattcaacacctgggtccacccagattcagctgcaattaccttttttccttattatgggtcacacatccctgattcctccatgtctcataattttgtgttgaaaactggacattaaaaaatatatatatatttatagacagactatagaatatatatatatgttgcaactctatattatgtcttatttaggttcattttgtttcattttagtaacttatctgtgcttaaattgaatgtctcctttgcaatgcaaggccattgatctctcttctcgatttttatactaatagttattttttaatttggcttgcaagaagttgcccctgcattggcaaagccactttattggtccagccatgattttggcaaaagttatgctcaaatacttaaatccattaggcttcctctctttatgcatagatttgtgtgtcaatcagggagtgcattcaaagttgcagccagttgtccagacttcctgggcttttacattttgctacgctcttttgggtctccctgactcagtgtgtagtttcctagtcagggtataatctgtgaagtctttatcttagccattccatgactctagtttccaggatctccatgttaaaggtctttctggtctagcactgtctttgttttgtgctgctctaacagaataccacagactgatacattagaaaggatagacatttatcttctcacagttctggaggttgaaaatgtccaagatcaagccattgacatctggtgagggcctgcttgctaaatcctctggaggggagaaatgccatgtcctcacatggtggaaggcagaagggcaagagacaaaaggggaattaactcgcccttttataatggcattaatgccactcatgaaagctctgtcctatcacctcccaaaggttccaccttctaatactgacacaatggcaaccaaatttcaacatgcatttcagaggggagaagcattcaaatcatagcagccactcactccagatgggaatacaaacccaaactaaccaagcttcaggttttaggcacctacgaagtttgcttctgttatgggaaaaggtgaaaggtttctatccctagacctaatttaagtctgcccattgtggaaaaaaagctgctggtttttgcaaccagctccatgtggctaaaactacatttcttaatgaccaggttggagaagggaatggatggagctgaggcaaaaagattgaagtctcctgctgtttttactaaagctctagtgatttttcaataagaaatgctttgcaatttaatgactacctttagtcaatttccacggccctaaaattgttgttgtttttttaaacacatttccccagttttgtacttgtctgtttttactgacctcctcatgtccccataaccagaagtctctcattcctacaccccatattttgatatttatattgtatctttatttaaaaacatatattcatcactattccctttgttgtaacaattatatattcttagtgctaaaggtaaatagataatcaacatttaccactaacctttatgtaaatgcatctccagtttgaaatgtattctattggagaatcctcaggaaaggctcatagcagcaatattctctgagttcttgtgtaactctaacatctttctgtagtctttattaaaaaagactttattaaaaaagaatataaaatctttggctcacattttctttccctgagtatattaactatgttactctattgttttctggcagaggactgctatcaaaaagctaataacaatcagattttctttccccatgtttgactttgctcgatacttttatatgaacatgcttaaagttgtccattctgggtctattttcctattttgcagtataatcgtttaatgtgcagtttctagtcattttaaattttattatatttttcttgaattatagtttttaatatttgttctgttccattgctttcatcttttttctttaatgtcttttattgtacatatatttttatcttctttgcatatcatttcctttgaatctcttttatcaacttttttctttttttataattacatattgctttatttatttcaaaatttccctcattctattttgaaaatgaacttcaatgaattaacttttgtgtttctgtgtttctggtttcattctaattttgtcttagtttctggagtgatttttaaaaatttattatttctaaccctttctcgaatttcgttacctatgttttgtaagcttttttcttccactggactcattgggaactttccaaaattgtgcacaatttcatcattttatttcttttagctcattttgaataatttggctatagtttttatttactttgttgtcgtgtcttgataatatgctctcattgttgtaggaatgttattttgttctctattctttttttgcttctggtatctttataggttattctatctcattccctttctatcactcatgcttaagttaaatgcattcttatcacagaggagtgggccagcctagcttttctagagtgttcagtatccctaaagccgcctcttctgttattttcaaggtaagtaatttaccattgtactttctgagtgtatttcctttgcttctatccctcacttttacctaaattgcctatttgatttctcttagtggacctgtcctgtcttattggattctatgtccagcagttttttctccccatggcatgtgtcctgagaagtcctttctgctccagcactgacaacctttttcttatttttcttgaagacactggtgatttggtgcccgcaaactctcttctccatttgagctactattcttggattaatctacctgtctttccagtgattacctgttactaggcagagggaggtggtatgggttctctagttctaagatccatcagaagcccagttgatcttcctctgtttctgcacagttactgatagcacagtggtttagtggatttttccccaccaattaagagggatgtgttgttatttagtgttcgtgtagatatgatctatgtatttttagttttgttaccctatttatcttctttgtttttatagagggtttcaggtatattcaaaaagtaatgccacttatactgccagcttcccagattctggacaaaatttacaaaaatgtaatacttatgtatttgactgatgttcattaaaatataactaacatatttggattgcatggacttcagagatattcagtatattttaaataaatatatataagtaaaacaattacaataatttaagaataaaattagatagtagtaatggtcttatgcaaatatggcaaaaaatgatgatagtagagatggtatagaaacaactccatttggaagtgctgtgatagctaagtgattttttttctccttaagggacaggggtcttttttttcaattatgggcttggagtactatttggaaacagcagtggagagcaaggaaagcactgatcccacctccagaacttgaggaattagagtgcaagaaaatatataaccactatttggaaatgctgtggggaagatgtaccctaatgggaagatctggttttaattaggaaaaggaggaggaaagagttattggtaaagaagatagatgatattgataagagattaaaatataacaaagatctaaaggctagatataaaatttataaacagaaatatgccattaaaatgtatactgttatatagcatatatttatatatatatttatatatataatttttagccctaaattggtgctttaatcttcagtttccttttccttgatcagaaagactataaaacttcataacctagcctttgcctttttattttgatggactaatactgtataaaagttataccgttttataacatatatatatatattcacaatgttagtagcaataagaatgttcatactcaatgatccattaattatacctcagagaatttatcttaagtagctgaatggtcagaagaaagctattagcatgaggatgatccttgctatatagcatgtaatggtttaaaataaagtaaaaagtccaaactgaaagagcataatgattcaataattggaaatgactaaatgaatgatgattagtatatatgataaaatgacatgaagcccccataaatttaaatcacctgtagttcaagaatcacacaaaacattctaaagtaacaacatatataacattcattggtaaacaggattgcagactatgagaatacatgcatgtatgcaaacaagatttgaatatagaaaaaagaatataagatttttaggatatttagatggtagagttgcctttatttgtaaacttcttttgatgctatagtttagtcacaaatttatatgtatgtatataaaactttcccaataggagagactacaaaatggatatttatcttctattaccttaaaaatgaaaataattaacactgcttcctcaaagtttccttatatatgtttgtgtcattcctttgtgggaggaatgtttataaactctgggaagactgttagatatgaagactgtaaaaagaacagaattttagggcaggaaaactattatgtatgatactataactgtggacacatgtcattatacatttgtccaaacccatagaatgtgcaaaattaagagtaaaccctaatgtaaactatgaactttgggtgataatgaagtgccagtgtgggttcgttaattgtaacaaatgtaccgctgtggaacaggatgtccacagtgggggaggctgtgggtgggtagaggtagtagatatactgggaactttgtactttctgctcaattttgctgtgaacctaaaactactccaaaaaataaagtccaacaaaataaaaagacagttaaggctaggttatgaagttttgtattctatctgatcaaggaaatggaacctgaagattaaagcaccaatttggggccaaagcagaacatgccaaatcatgagtttgattctgttggggtcatttccttgtaatttttcagtgtttagcaacaattctgtgctcctcagtgactctgtttagccacttatacaatgagggctatcgtgggagtttgcctctctttttcataggtgtaccctgaggacagatgaatccctatactaaaactgtttttgtctctttgataaaaagcactttacaaaccaatcagagattcacatattttctaccttatgttttgttacagttacagcagatgaatggaacagcaaccatacgatagaaatagagataaatcagactctggaaataccatgctttcaaaatagctcctcaaaaatttcatctgagttcacctatgcatggtcggtggtaagtgttgcccttttcagtgaataacctcaatggtctttaaacattaacgaagtaaaatgaataagcagtaataatagggaaggaagcatacaaataacaggcaggcattatgccagtggtgggaagaggggtagggaaggaaggagaggtcactcagattccttctcacaggcaagcctctgagtctatgaatgcagtgaattaatttataaatttgcttctaaagattgatttttacttctatctatataccaaaccatggttacagaaagaacaaagtgtgatagtgccctagaaaggagccatattcagcagaagcccctactcacagatacttgtttcacaaacaacatatgcagagctacagactcctttctccaaaaacacttattactacatcctgggaaatatccaacattgggttagatagggaagcacagactctaatgcttgtgaaatataagcagcaaatgtatatgagacgagcaggccttgtataagaaacagtcactgcccagctcttgtaatgccacagggggctgcaggcctatagttgcatgccttctcattaaaaaacaaaaaacagacaaacaaacaaaagccagaaatctggatttttatgaaaaattttccaattttaaaaatgatgtgtagagcaaaaatgaatagtggtctattattttgatgttagagcaaaaataagtactggtctattattttgctaagacactgtaaaatataactctaattataaatttaaaaaatttcactgaggattcactttggcagttatggtgggccaactattaagttgcttaacatgcttaacatgtcctgtgatgactaaattctcccactacttttctctccttgaaatactgcagagttcatctatacagatctttatctaatcggatttatgatttaatttggcctgtcccttaacaaaactgcatcagttatctactttgtctgcctttgttattttatccttagtctacattgttctgcctaatgcatcagtttatttttaaaatctaaatttaatcttaaaaactaaaattgagctttttctcataacacgtaaacaaaatcaacatgaggataataataaatatgaaagaattgtgtcattataactttaatgttagtcaaccaaatggcagccagctactaaccagtgtatacagtaaacccctaaaactgttaaaaacaaatgacaacaaagagacaaacacaattatagaggtgatcataaacatgatttcaagaatcacataatagggcattcatttagatgatacagaatatgattactgtatgttaatttttatatttttgtcaaaatgaaaacaaaggatttaaaaattcttatgaaactcacagattctcatgaatgtaacagctggcacaatttggaaaatactgtgattcagatggctgattattcatattacaagctacctagatttttgtggacagtcttggaaactagaccctatatataaaaacatttccttgggtttgtgccaaacccaaaataattgacttgtactaaaaactttaaatacaacctactgataatttttcactgtctaggtatttttcagatagtaaataataaaaagaattatattttaaaataactttcccaaatggttgtaaaacctacagtatctctttgtcatctgtcacaaaactcgtctgcccttttataggatttgctttccaaaaagtaagtcttcctggacagtaggcctatcattaggatgagtataagtccattgttcttaataaacatgatgcaacatagttctgagaaaaaggttaattaagtgagataatttcaggaggacagaaatgtactatactaaaccttttagtaatgaaatgcatagcttgcttaatattttccaccaacagagcagaaagttcctatcccagttatctcaaattcattaacaatggcaactggtttaataaagccttactgtagatatttttactgtagtgttcttatcttgtctcatgggtatgtaatctgtttttctaagcaaatgtaaagccttcagtatgtgtcttttatgtgagtctgagcttctcctggacaaaaagttgtatctctcatttctttttttttccaaagtataaattcatattttgtaggaaatgtagtttacaaaacagtatcaatcgctacccccaatccagatgacccactttcctccgaagggggacgtttaggtcctattccactgggcaagggtaaaatgattcagtagtcttccaggttaacagtaaattcttctcccaaggctggggccgtcaaggcacagtctgtatgaggctcaccctgtctgaccctaggctggggctgcttgctcggtaggcaggaattggggtgggggtgggggctcagggaagggtctgcaccctgagacttctgcttacaggagggtgctgggaaaaccctgccttgggttggggaatcccctctctcccacctttggggaatagggtggggagggggtaagtgggaccctgctgcctggagggctcaggtctgagcagcagggagcccttagtgcccactccagcagacctattgggaatttactacctgaagacaaattataggtctagggtcttctttgtgattttgggggagtcgaggcattggggggtgagaggtatggtctaaggtcacagtctgggagaggagtccttgggatcaaaggttgtgcagaagcaccttccccacctcctgcctcatgagataaggttgccaggattccattatcatggtgaatttctctgggctcgtgggttaggggtcacagtggagccaccaaggtagaaatcacaaatgggacgcatgtgtgttaactgacagtggcctggccagacatcagggggcactagatccttggcaagaaagctaagggatcaacaggtgagatgtgagacaccaggcgcatggcagctcacacgtacatggcccgggacatgacaaagcatttgccctggtaggaatcagaggggctgctgtaggacagagcatcatagatggggttgatcttgtccagatactcttcctcctcctccccctcctcatcctctagatccagggaaacgtcttccaaagcaggtggccctggaggcaccgggatgggggaccccaggcttgtggctccagggtgcaagggtcctgaccgctcttccaaggtgggcagctcatggtatcgaggcatttcctgctcagtgcatgaggcgccagcgtcaaagtagggggtcttgagtgggctgtgctctgaggccaccagagtgaaaagctgggagggcatctcctgctcctccagcttctcttttggggtcagcggcttgtaggagggaggtccctccaggctgtggggtaggaggtaggtcaagtggagactaagacccgggcatccctctgaatccagggttacagcacatgctgttccctctacctgggtcccccttttccctgcccccttttcttgcctggagtaagagtttttttgttttgttttggtttttggtttttggttttttttttttattgctcatttcaaaaatctccagcatctagtatagagtctagagcataggtactcataaatacttaataaatacttgaattaatttatttctatttgtcccctttccccacagtcttattcattgttctcatattaaattaatgatcactaaattcatgctgtttgattgtttaatgagtggcagctcattaagtatcaaagacttgacaactgatgagtcaccgtttatcaagtagcttcctttaaagaaactaagaaggccatgtagacattacctttggattctgccaggacatttagagtaaatgaatgccagagagtgcatctaaggtcacacagtgagagggtgaatcttaaacatccactagaacctcaagccatgctgccactttaaagaatgcaccatgataccaacaacttgaagaatctttctaaagaaacctttcttcaaagggaacatggtgttggcaaatgtgctgattaaaatcctatggtacatttcctttcaaaatgtcaaaatctatttgctcctctcatttacatctatgccccacaatattgatggctgtaggattcagccagtctattaaaccatctaatgtccttataaagtagattacatagggtggttatagtctcccttaaatgagaacaaacttcctaaataagtggagggaacaaactgcctgacagttcataaaccacaccctgggctcatggttagaacatcccacagcaaggaagtaaaggaacagaatggaaaaatccccacattcatgcaagtgcagaaacccatgattagtgtctttgggctgacctatgctcatcataatggtaaaaaacacacccatgagtagagatttaagatgttaatgagacatgccatgtatctacccgcacgtacaacaatagcacatgcacatcgggaggaccaccccgaacatgcttaatagcaacacaccttcccaacccttcatgaataatcatatgagactctcataaagggagtttccctagtgtcagtcagcatcatctcacctttgagtagcccgctgtgatcagcggtgagtgtacttttgctttgcagtaagctctcttacctcttttcattttgaacttgctctcaaattcttttgtgtggtaaagtcaaaaacaaactggtgccactggcaacacttatattagggaataaactacaactcttagtatcataattgttacatgtctgcaaaggacacaaatattccagccaatccatatttttggtctttaatctcttcttaaactaagaataagaatcataagataagcctattgttcttacaaacatatataatctctttagaaagagattacaacatagaaatgatgaaggtgagctcaggagagcagaaacttcctatactgaactctgggaagtttcaaaggccttctgccccaagtgactcatgaaaccctggaaacaatttacaaactaaaattatctaagtcactgaaaaacaaaagtgatgtcttcctgtttgtggaattttataaaagctaattaattcaattatgaccctcataggaaaggttataattgggattctgtctcataaaataaactcttatgccacatctgcctgatctcatgccaaggctgtgttaagtgtgttaatgggacagactctgcattttgggaagttacatcgcaggactgggaatacactgaggtagacgggcatcaggtgcaaatggacagtgtatctaacattcatccagcatgaggggtaactaagtaaacacaaagggttaactctctaatggaaactaataatctacgtgaatggaggagtaatatataagaaatcctagaatatgtgtacttagatgggatgcagttggaagctgaaagataagtggtattttttcccatcttatgcattgggacataagcatatagtcatgagggaagttctgcaggcttattctggaagcttctaaatatactctaatattctgttttcatagcaaactatcatccttgtttcccacagcatgaatttcagttcagtccaataaacatatatgaatctgttttgagcactaagtcctgcagggatacaaaactatattggacatatttcctaccatgacatacacctttaataaaaatgttaaaaacggcagcatggggaaaatagttcaattccgactagatgaacctgggaaagcttcttagaaaaggttatatctgagctggataattaaatagttggctagcaaaagacagacatatactacaccaagaccctgggacctttaagtacaaattggtagtgcagacgggaaaatgcataagagggaatatttgttcccaaagtcagtgaaaataaagaaattcacgatttttctctttaaaatcatgaagagaaggacaagaatatttccaattcaaacaattcaatattagtgacaaaagcacataactatagattctcatctatcttaaaatttttatctataaatatatcttcaacatgctcttatttaatatttgtgctatttatgttaaaaggtaagtggtactatagacaatgtttgttatgcttatggatgcctcactattcagaaaacaaaactgtaacctcttacctgatggcagctgattctaattgtctttaataaaaaaatgaagtgccaaccaaactacaaagtgttgataaccaacagcaatggttagaaatatattgttctggtgctctagaaaatggatgtggggagctttgcaagcagcttgctttgacagcactgactggatggagaataaatggaggaaatgtgaagataagaaacagtttggagaaaaaaggagtagcaatcaatacagttaacagcagttattgaatgagctctgtacactcagcacctgccatgtgctgtggtcagtgcagccagctctgacatggagctggtttcaaggagctcaggatagctcagagatgaaatatcatcactaaatcaaggaggttgaacatcccaagtctgaaaacctgaaattcaaaatgctccaaaatctgaaacttttttagcgcacacatgatgctcaaaagaaatgttcaatggatcatttcagatttcagattttcagatttaagatgttcaactggcataatgtaaatagtccaaaatccaaaacatctgagcctgaaacatttctgataccaagcatttcagataagggttactcaacctgtagtacaaagattcctgttctaaattgaaaattttgattctagttcaaaaacaaagcctaaatgacttattttaggatttgtcaagtatttaagggacatataacagcagtttcatgattcaataagatccctttcagcagttatcatgctaattattttatcaagctcctatacataatttaattatgcatttgtttcttttctgtggctcctgattttcatatttgtttgtgtgtacatgtttgttcttctccttaagtatatttttagtgcaaaaaatctatttaaaaattatatttaaaaatatgaatttttagattttttttttttgaggcagtgtctcactttgctgcccaggccggagtgcagtgacataatcttggctcactgcagccttgacctccccaggctcaggtgatcctcccacctcagcctcccaaggaactgggaccacaggcatgtgccaccatacccagctaacttttttttttttttgtatttttagtaaagacagggtttcaccatgtttcccaggctggtcttgaactcctgggctcaagaaatccaccagccttggcctcccaaagtgctggaattacaggcatgagccaccaaatccagcccttaagtagattataagtaggaaaggctaagactgtttcttttactacttttgtgagactgtatatagcaaagtcattaacagtgtgatatttggagggaaattgctgttttcaagacctggatctccactacttactggctatgagacctaagggctgggattagagtgaagcaaggaaggccattaaccttggaagcaaaatttaaaggagcacaaaaagttagtgatcaagataaatattttaatacaacatttttaaaaatcagaagttagggaaaatccatggtgaacaaaacatcaaatttgtaaataaaggcagactgttgcttgtgtgtttttcagaccttgctacatttatattgtttaaggaacagtattttccaatcaacttgttgttcatggccattgtgtcccccaagggccaacccttacgggttgacattggcaagagagcagattgagctattcatggctttataactgtcttaatctattttgtgctgctacatgtaacagaatatctgaaactaagaaatttataaacagaacatttattctctcaagttctggaggctgggaagtccaaaatcaaggtgccagcaagttagagcctggtctctgtgcttccaagatggcaccttgaatgctatgttctccagagaggacaaaaatctttgtcctcacatggcagaagagcagaagagagagaactcactactacaagcactttgtagagtggcattaatctatttatgagggcagagccctttggatctcccattaggcttcacctcccaacactatgccattggggattaagtttcaatatgagttttggaagggacaaaaacattcaaaccatagcaatgaatctccataattcctcagtttagccaggcacatagtgaatactcatgagatagcaggttgatcataggctggactagataataataagcttgtattattgaacatctattaagtgtcaggactagagtaagtatatcatatatgttacctcattaaatctatatttcccattaaaatgtgggagtctaccaaggtgtgaatccataaagttttagaaatacttattaatattttttaaagtggacaatttttttctttgaagaacaggaaaagaaaaaactggtagaaataaggctgtcacatacaggttcttgcctctatctgtctgtttcctgaagactaggttagctaagagcattattatcaagtaggagttgaggtgtgctctaaacacctatcatcaaaagtgggccaatatgtcatacaaaggcccctttcaatcaacaaattgccctcacccctgtaatctacaactcacatgaaaggttctagctttctaaaatttctattaaatttctcactgtagatacttcagaaaggttttttatttattattattttatagtttggttcttattagtacaaattgtatctgagacttatttgtccccggttctgggcctccttgctttttgatgctgtgacttaaataactcttactttgtgtgatctttgatcaaatttttaacctcaatttattctacatagttgtaagaagtaaataagacttgaaaggactttgcagaattcttagaatatagtaggtgctaaataaatttaaactatgactaataagattatgaaagtttaataatggtcataacataatactagtattatttctccctctcccagtcctaggcatttcgttgtttgcctgtgctaattttttcacctctcctcccatttgctctgtgaaggcagccactcatatgtaagttcttgctactgccccctttataactgaagactctagaatgtcttaggatctccttatattgtaggttacggggcattctttgcaactgaatcccatctttcctaatgaaggaacaaacccttctttctgcaaaagtcaactgcccaggggaaaaaagcaacctttggataagttggaaggttttgtattttttctctatcaactaaaccacctagtcacaatctgctatataataaagaaaaaagcagtttttctcaccagtctccaacttcagcatgtaactgctctttttcccacaacaaagtgacagttgatggaactgttccaaatggcattcatatactaaatgaccaaggagcattttcaactctaaaatcctgacacacaaaaaagcaagaggctgccaaacgtacctgtgccaaaagatctgcagggggtacctgccttcttaattattgacctccagacttgccagtgctgagtgacatgctctccactttcttctcctgtccccacccaatacttagagctcctctgggggatcctatctctgtaatacagtctttctcccttcttcttttgctcttcttccttaggaaaacagcagcacggattcttgggtccttctttctaagggtataaaggtatgtaaattgctgcaggaaaaagaattcagcagagtatgattatttgcaggcaataacacaatactatctgtatgtaagactgacacaaatcctagccagattcagctaaagaacggtgtcttacataagagtttctactaagtatattctggaattttctatttaaactatttaagaagtctaccttagtccatcctctgtttctgcccatacttgaatgtggtttccatttcttgtagcctgatctgtctcatttttaaaactagagattccaattcatagatcttatcattattttgtaacatttcccccattgaatgcactcctgtttacccttctccattttacttccctccatttcccctgatgactgtacacaaggattcatctgttgtttagagttaggccagtagatgtcagccctggatctcctgagtaccttaaaagcaattgtcctagctatggccttatcccagacagactgaattagaatctctagaagacaagcttgtgcatcagagtgttttaaaagcagctcaactgagaatgttgagtcatactaacaggatatgaagacctaacccatcctctacccttgtgcccgtcaagaatcccctccttactgggcccctagtgagcacttttattgacatcaaccaacactgtgacaccccagggagtttgtccaaaaaaattccaggcacagagagaataatagggcttttcatcacagaccgaagaaaggatacgggatagaagaaccaagtacctcaaatatactctgatctccaaaattcagattaacattttcaggctactcttcatgcatcctctttgaagctaacacaaacacagaagaaagggaataaggttaggaccagaacaaggctgtgaaatgaggcaaggagctgccccagggcacaaaatttaaggaggtactcactgttgggtgtcaacatttcacttgcaagactttgagaatgccactttacctgatcctagtccaggctcggggaggagctgacaaagagtcattttctaaaggaatttagggatagctgtaatcatccagtttaaatgaagattttatgaaatcttcacactgatacagtcttctcatcttagcagtaagatgtcagaacttcttaaataaaaattaaaatctgccattagtcctgcccattccaaaccccaaatcctgctccagatatacagttcatagaagattatgaaggagaagctctagtcagaagaacagaatgcttccatttgttaggagagggtaacaatagtttttaactgaaagtcaagtgtatcatactttctctagtaatatactaaatgtcttctaatttcaatccttcattcttcctctctactttacaaaaagtaaatgaatcagtgcttgtcgaatgcctagttcagagctggcacagttgaggactcaataactggtaacaatttttctcaccaggaggataatggaactcaggaaacacttatctcccaaaatcacctcatcagcaattccacattacttaaagatagagtcaagcttggtacagactacagactccacctctctccagtccaaatcttcgatgatgggcggaagttctcttgccacattagagtcggtcctaacaaaatcttgaggagctccaccacagtcaaggtttttggtaagggcttttgttctacagactcactggcatcctcctgtctcctgccctgctcttccttgaagaggaagcaccctattatgctgcagagcagccacatgtgggtaacagtgctggagtctgtttccctggatacttgtcattcttgttgggcagggggatgagggtaggatgctaaagaatgatgattctgttaacagaataaaatcatacagaagccaataattttctgtattggtcagttttctgttgcttacaatgaaatacctgaaactgagtaatttgtaaagaaaaggaatttattacttacagttatggaggctaagtccaaggtcgaggggacgcatctggtaagagccttcttgcggatggggactctctgaagaatcccaaggtggcacacggtatcacatggcgaggggacagagtttgctaatgtgctaactcaggtctctcttcctcttcttataaggccaccagtttccctcccattataactcatgactccagtaacccattaatccatgaatggattaatcttattcataagggcagagacctcatgattcaatcacctctgaaaggccccagctctcaatactgccacactggagattaagtttcaatatgaattttggagtggacattcaaaccataacagacagaacaatttcctggtgaccactatcttatttacaatgttaatatttctcagaatactggaaatctctttaattgtaactgccaaaatctaattgtttagttgtctaattgtcttagttgcttgcttgagcaaggtggagtaaagtcagtgagaaaaggaaggtgataaatatagccccagagaaactgcagaagttcctcctcccctgctatcctgccaaggcccagctggggtgagaccatccaggtccagcccttccagcaaaggagcctttaggaaaggccctctgaacctgcactctcaggagtgtggagctgagctgtgaaatccactgtggcctcactcaaaatgcagactatctgcagcgtgccaatttaaggaggaaaggttaaaattctattttccccagtggtacaaggaagtaccactaattaataaacaccattaatgaagggaagcctctgcctttggatgtttttttcattttttgtgacaaagatctgtgttttttagaaagtcaattttaaagaaggcaaagagaaaagcagtgaggtggatagacaattaattatttttgaaaatgagataaacaaagagaaaataacttcacaaacctatggacacaggctgctagattgttcctcaattctctaaagggcagagcaagcaaaaaaaaattatttggaattgtattgccctattattggcagtcatacaatttagtattttgaagaaaacacaaaattgcctcccccttccctcctctgtcctccccttccctctgcatcctcccccttctctttctcttcatctctcctcagggatggactaggcaataatcatccctgatgatcaggttccttacggagcctaaacagtgtcctgtgaagagttggaaacaagctgttcatctcttttgctatcaccatttgtttatttaccaggctgtgactgtcttagtgcaaacatgaaactgcttcatctggtctattgtcaaaccaatgaaggcagccatcctcaatgtagaaagaaatatcaattttaatctaggcaagctgtgtcccctattgatcaagactttttgcatcataacttgatctaattgccttgtcaacatttatgctgtgtcctgtatctctttgctgcattaaaacacctctatcttgatcttaaatgtttttcagccttctatatctcatttttatcaccctattggattctacagctctttgtctctacatttctcttgtttcttctttgaagtcctttcggtggatgcttaaaaatatgaaaccctgcctgcttgttcagaaaattagatttttcgtgcttcctggtttttgcatttagtaaattggctgggcgggttgtgtttgggtggagtctcatccagtccttaacctattttgaggtgttacccaagtatatattgtggccctgaccacatatcttataagaacctactttacatcccttggtgattcctcatatagaataagtctccccaaaacacccatgaaaaccttgaaatcaatacccaaatatatatcagatctattccacatgccctaaacccagcatatttcttcttcccaaacaatgtccattgctcaactcttcattgtctaacagaccagggacaagaggggctactccagcaattttgccacttcctgcatctccttcactggtctcctttggttttcctttccttggcagggagtcacctgcccatcacagggttctgttccactcctaaattccaaatctgattgtcctcaacctcaaagaaaatctgtctcaccctgtcacctctgcaatttttagtagttgttctttctttcagggcttttattctgctggtatttgttaacaggaggtaagagatacctctccatccattagtgtttcaggttgtatcttggttttgggttcccctgaaataaaacatcgagataaggattgcggttaatttatttgaaaggccatcctgggaaacatcagaaaaggagtgagaaagtgagtcagggaagggaaggaagataagaaaatgtacaagattatatcagttagcaccataggtttagagctcatcttactgggagacagcatagaacacacatcagagttatcccacatgaagggcaagaaagctggggtattcatctaccatctctccatctgtatcactattaactctctgggactcccagtttttactacttgtggactaagtatactcccataatctcaataaatcattatgcaaagagtcatctagtcatcaaagagttatcccagtaagagatcttcagtatgccaaggtaaatggctagtggctgtagcaggcactgacagcatctgtgactggaggtttagcattctttccactgagtcatagaaggctgtgtttgctatgctcaagaatttacttgaagccacttctgttcaacacgatgtacttaatgtctagtttgtgctgggcagttaagtgctagagatgaagaaattgataaaatactggctcagaggcacttaaaatctagtaaaacaacaaaatcactgaaatattccctgatatttcctagtgccaagcaaccaaacaagaatcaaatgtttctctgctccacttcagggacctttataatgagactttatttctaagctgcattagttcattttcatgctgctgataaagacatacccaaaactgggaagaaaaagagatttagttggacttaaagttccacatggctggggaggcctcagaatcatggcaggaggtgaaaggcacttcttacatggcagcagcaacagaaaaatgaggaaaatcaaaagcataaatgcctgataaacccattagatctcatgagacttattcactatagcatggtaaagaccagccctcatgattcaattgcctcccaccaggtcccttctgggagacacaattcaagttgagatttgggtggggacacagccaaaccatataatttcacccatggcctgtcccaaatctcatgtcctcacatttcaaaatcaatcatgccttcccaacagtcccccatattctcaacccatttcagcattaacccaaaagtccaagtccaaagtcccatctgagacaaggcaagtcccttctgcctatgagcctgtaaaatcaaacgcaagttagttactttctagatataatgggggtataagcattcagtaaatacaaccattctaaatgggagaaattggccaaaacaaaggggctgcaggccccatgcaagtccaaaatccaaaagggcagtcaaatcttaaagttccaaaatgatctcctttgactctatgtcttgcatctgggtcacacagatgcaagaggtaggttcccatgttcttaggcagttctgtccctgtggctttacagggtacagcctccctcctggctgctttcacaggctagtgttgagtgtctgcagctttttcaggagcacagtgcaatctgttggtggatctaccattctggggtctggaggatggtggccctcttctcacagctccactagtcagtgccccattagggactctgtgtgggggctccaaccccacatttcccttctgcactgcccaagcagaggttcttcatgagggccccgcccttgcagcaaacttttgctgggtattcagacatttccataaatcttctgaaatctaggtagatgttcccaaacctcagttcttgacttctctgcacgcacaggctcaacaccatgtggaagctgccaaggcttggggattccacacttttagaagcaatggcccaagctgcacgttggcccctttcagccatagctggaatggctgggacacagggcaccaagtcccgaggctgcacacagcaaggggaccctgggcccagcccaggaaaccactttttcctcctgggcctctggacctgtgatgggaggggctgctgtgaaggtctctgatgtggcctggggacattttccccatggtcttgtagattaacattaggctccttcctacttatgcaaatttcggcagccagcttgaatttctccctagaaaatgggtttctcttttctattgcatagtcaggctgcaaattttccaaactttcatgctctgcttcccttataaaactgagtgcctttaacagcacccaatacacctctcgaatgctttgctgcttagaaatttctcctgccagacaccctaaatcatctcttgtaagtccaaagttccacaaatctctagggcataggcaaaatgctgccagtctctttgctaaaacataacaagagtcacctttgctccagttcccaacaagttcctcatctctatctgagaccacttcagcctcaaccttattgttcatatcaccatcagcatttttgtcaaagtgattcaacaaatctctaggaggttccaaactttacaacattttctcgtcttcttctgagccctccaaactgtttcatcctctgcctgttacccagttccaaagttgcatccacatttttgggtatattttcagcaacactcgactgtactggtactaatttattgtattagtctgttttcacactgctgataaagacatacccaagactgggaagaaaaagaagtttaattggacttacagttccacatggctggggaggcctcagaatcatggtgcgtggtgaaaggtacttcttacacagcaatgggaagagaaaaatggggagaagcaaaggcgggaatccctgatagacccaccagatctcatgaaacttattcactatcatgagaatagcatgggaaagaccagcccccgtgattcaattacctctcgctgggtctcttccacaacacatgggaattctgggagatacaattcaagttgagatttgagtgaggacagagccaaaccatatcataagcctttggacatgtagaacattgctcttttctctccctccccaccacccatcctccgcttgcactaccagtcttccacattcccaattttacttgactcatcactgataaccacatcacatcttccaaaagcctcctcctatcctccaaggttaggttagaaaatttatttaaaagctgtcttcaaatcctacatgtccttaatcattgcacttatctcagtgtattgtaacttccagtttgtttatctgtattcccatgaaactgtagatttcttaagaacagtgaatattatttgtccacatttgtttcctaagcatctagcatactgccaggtacacagtgggcctggcagtattatattaataaatattaatttataaatattaatatttaatgaatgaagatgcttatagacacacacacacatacacacactagtggccaggtaggatgacatttggtgccactaactatgttttatttgcctttaagctaaaccagaaatccctgtgattgtggaaaataactccacggatgtcttggtagaggtgagtcacataaaagcctttgaaaatctacagtattacatgtaaggtgtgtcaggttgcatagttgccaggaatgttctctcaaagaactttactccttggcccttgaccaattaactgctaatagggatgaagggaagctgggttgtttctagaaagtgaatgggaatttttacttttagacttagggctctcagaatgtttgatgtgcacttttagtccttaaatttctcagaaaaaaaaatagtcacaatttgtttaaacttctcttttataaaaattcaggtggatagtgaggacaaagtagggcagaaagcagtgtgagccctggtgtaagaaggaggcttttgctcagctgacgtttaatttgttctaatccatttcctttacccactttcccattgtttttatttcaaagtgacaggaggagatatgccctcctgtactcctgcagaaccctgggtatgtctttggtagtaatgaagaagggcaggagaaaaaagaaaattgaatagggacctctgacttaacttcttctgggtggtagttaccagcctgtagtcactaggatctggactcaatttctcgctctttctcttgcgagctgtgaccttgggcaaattacttcatgtctttgcagtcagtttccccatctatatgaagtgaataataatagtatcttcacattgttgctgtttttaaaaattaaataacatatgaaaaaatctaagtacagtgtgtgacatatattaagtgtttaataaacattattgttcttgtttttgttattattattatctgtgttaatcaactgtcttgtggccttatgactttagccaagcttttaaaaaccctaagtaaaaaatatactcattaattctctaacattttctattacatggggcgagagaaaattatattcattctagtttcttctcgcaccaataacattaaataacttacaatctctggtcttactgaatattagtcatttaatttgataattgcatacaaatcatagcttagattgtttgagatggttttgcataacttggaaaaatatcttccaagtagttgtgtcttttgccagtttcatatattagtctcttaggtaactgcttgtattagtccattttcatgctgccagtaaagacacacccaagactgggtaatttatacagggaaaagagtttaattggacttacagttgcacatagctggggaagcctgacaatcatggcggaaggcaagaaggagcacatcatgtcttacatggatggcagagggcaaaaagacaatgtgcaggaaaactcccccttataataaccatcagatctcatgagacttactcactatcatgataacagcacaggaaagtccccatgcttcaattacctcccaccaggtccctcccacaacacgtgggaattcgagattagatttgggtggtgacacagccaaaccatatcattccacctctgacctctcccaaatctcatgtcctcacatttcaaaaccaatcattcctttccaacagtcccccaaagtcttaactcattgcagcattaactcaaaagtccagagtccaaagtctcatctgagataaggcaagtcccttctgcctatgaacctgtaaaatcaaaagcatgttagttacatcctagatacaatggagtacaggtattggataaatacagccattccaaatggaagacattggccaaaacaagtctgaaatccagcagggcagtcaaatcttaaggctccaaaatgatctcctttgactccaagactcatatccaggtcatacagatgcaagaggtgggttcccatagtcttaggcagctccacccctgtggctttgcagggtataactcccctcctggctgttttcacaggctggcattgagtgtctgcagcttttccaggcacacagtgcaagctgttggtggatctaccattctgtggtctgaaggatggtagtcctcttctcacatctctgctaggtggtgtcccattagggacacaagctctgccagtgtggctttgcaggatacagcctccctcctggctgctttcatggtctgatgatgagtttctgcagcttttccaggcacacagtgcaagctgtcacggatctaccattctgggatctgaagaatggtggtcctcttctcacagctccactaggcagtagcatagtggggactacttgtggggcctccaaccccacatcttccttttgcactgccctaggtggggttctccatgagggccccgcctgcagcaaacttttgcctgggcatccaggcattcccatacatcttctgaaatgtaggcagaggttcccaaacctcaattcttgacttctgtgcacctacaggctgaacaccacgtggaagcttccaaggcttgggacttccaccctctgaagcagcagcccaagctgtacccttggcccctttcagttatggctggagtggctaggacacagggcaccaagtcccaagactgcgcacagcatggagacctggggcatcacccacaaatccattttttcctcctaaacctctgggcctctgaaggaggggctgctgcaaaagtctccaacatgccctggaaacattttccccattgccttgatgattaacattcagctccttgttacttatgcaaatttctgcagccagcttgattttctctccagaaaatgggattttcttttctatcacattgtcaggctacaaattttccaaacttttattctctgtttatcttttgaaactgaatgcctttaacagcacccaagttacctcttgcatgctttgctgcttagaaattttttctgccagatatcctaaatcatctatcttaagttcaaagttccacagatctctagggtaggggcaaaatgccaccagtctcttaactaaaacataacaagagtcatctttgctccagttcccaacaagttcctcatctccatctgagacaacctcggcctggaccttattgttcatattactattggcatttttgttaaagccattcagcaagtctctaggaagttccaaactttcccatattttcctgtcttcttctgaacccaccaaactgttccaacctctgcctgttacccagttccaaagttgcatccacatttttggttattttttcagcagtgcccactcttctgataccaatttactgtattagtccattttcatactactgataaagacatacccaagactgggtaatttatacaggaaaaaggttataataaccatcagatctcatgagacttactcactgtcacaaaaacagcatgggaaagacctgcccccatgattcagttacctctcactgggagttcaagatgagatttggatgaggacacagccaaaccatatcactgctattataatcctgattatacagcaaaagatttaatcatttttgctgtgttgtaacttaatttctaagtgtattagtgaacttcatttcaatagtttacatttcaaaaataagctaatcatacagcttttggtaggtgtttttgtttctttttttttctttttttttttttttgagatgagtctcactctgtcacccaggctggagtccagtgccgcgatctctgctcactgcaagctccgcctcctgggttcacgctattctcctgcctcagcctcctgagtagctgggattacaggcgcctgccaccatgcctggctaattttttgtatttttagtagagatggggtttcaccgtgttagccagggtggtctcaatgccctgacctcgtgatccgcccgcctcggcctcccagagtgctgggattacaggcatgagccaccatgcccggcctgtttttgttttttataaggatctctaatagattcttggtgccagtgtttacaggtaatatgggctcaatccagatataggaccataaattggatccaagaatcccagttttaaaataaaacaaaaaactttacctaatgtgccataaaatttcctcttctctacccttgctttagtgctaactaagaaaaccagagaattttccttcctagagaattagtgagtaatctttctccaatcacacataaccagctacaggacatggcttgtctatggatcttttcagatcttgccaaacattagtaactcctcactctaatattcttacaatccctgctgtatttttaataatttattaactcttcaaagtcctttcacatacttttatcttgtgctgctcccagtgagcctctgaaatagatagggcatctgtcattttacagatgaaaaattggggcctggaaagtcttaacaactggctgagtcactaataaggggcagagctgggatgcatatttagtgtgcctgtatccaggcagaatagtattattatgatggaaggatatcatgcttcagggtcagatagcacaagtgtcaaattctaattcaactacttagctggttacataccctcatcaattaattaacctccacgagcctcagctaactcatatctaaaactggaataataacaaatacttcagagggttcttaggaaggttaaatttatgctctaatggagttcatggcacatagtatacatttcaggaatatttcttccctacccactatttatcatttacccactctcttacgttcataaatcagctatgtgactgattctagcagatactgtggaataattttttttaacccagaatacagactgtgggatctgatagaactaggtttgaattctcttccagcacttattaactctggcccctaagagctcagttccttaacttcctcaaaagtaaatgagggcaatggctccaacttcacaagggtgatgttaaggatcaagtaagagaatgtatgcaaaatacctaccatccagcaaccacaggtttttggtgttggcaatttcctgcccctccttcattccttagaaattcttgaagtcaacatgcacacactgtctctgctacctgttcactacactagcagcccgcagtgtggaaatactctggggacttggtcagttgtgagctgtgtcttcctgtgttattagttaaacttacaaagtttatggctaattttagtatttctgtaaaatacaagacccaaaagcatgatgcccctcaggcatggacatgccgtagatgtctaaagagagtgtcacacctgtgaatgttgtatcttatgcattcccaaagtcaagattttgccagggctccaacttgacacacagcttcactcctgcactacaatgagaaaagagtctttaacctaaatttcagggcccctccatgtggcaggtttttgtattagagcaaaagatatcaagccaaagagcccctcaactcacagctaatgatgtagcataagaaggcacaagagggatgcataaaagctccagagtgtactcagcagttcagactttccacaagcctcatacgtctctcactcttatgcttgtgctttatactttagccccgtcatctccatgggtcttgttcatatcactcgctacctttgttatgtttgaaataaattaggaaaaaaaatctaaagaaaattatctgtcatgaaacataggaaacaaaagcagtttggggttaagttgcctacaaaggaagagaggctacaatattaataaccatgtaaaacagataccagaggccagaagcagtggctcacgcctgtaatcccaacactttgggaggccgaggtgcgcggatcatgaggtcaagagatccagaccatcctggccaacgtggtgaaaccttgtctgtgctaaaaatacaaaaattagctgggcgtggtggcacgcacctgtagtcccagctactcaggaggcttaggcagaagaattgcttgaacccaggaggcggaggttgcagtgagccaagatcgcgccactgcactcctgcctggcaagagagtgagactccatcttaaaaaaaaaaaaaaaaaaaaaaaagacaccagaacctaaataccacactggttggcatcagcagagctccagcatctttgtgcagaatttgattatttgtgtttatttggtttgggttttgcaaagcttgaaccctgtggtttcctcaagcttcctaagccccactccaaaaatatgtgttttggttttcattttttaaataattaggtattacagcctccttttttttcctagcatcttttgcaacataataaggttctgagtccaaatgtccagccgtcgtcacttgcactggtgagcacctgagcttgcaccacaggtagagaaggttctaaaagggcatcatacctctgtggggagaccacatgacaaatgaaatctttaatatcaggcagatctctagataaaaaaagaacatgacgggacttcagtgtggcctggttatttcacaagcctggtgcctggacttttgtttgttctacaaacagctgttagggaagacaggtctagaagtgagggctgcctagcaagtctaggaagaatatgagtgaactacataggtcagggccaaaggaggcaagacaccactgttacacaaggacatcctctgcttccagagaggttggtgcccacaaagtacttgggctatctctgagataatgggatgctgtctttatctattcctgtcttcccaagctctttccccactccatccccattcccaacccacattatgttttgttttttaatgtgtgtgtttggttggaggagggtggtgtggttatagaggaatctgtcttctataacaaatatcaggtccagtgcagaggccagagtactttccagtttgattttattctatttctaaattaatattttaggcatactttcagcagcccaggaaattactctctccctatagactgttaggatctcttttttcaaagcatctctgaacatttaaaggtaaacagtttttaaaaatcagtgaacagtggattggcatgcagttagcatttcagaggtatgagtaaaatctaaaacctactgttcaaataaataactggtctgtaggcacaaagcaaaatcaagttaactcattaaaattaacttcaggatctaagaaaatgtactccatccttccctcattcagacagtcatgttctcttccattttcatgataaattttccctagagcactgtctctcttccccatctttgcatttcttctctatcccatttatttctaactttccttcctctgttctttatttctccttacttcctttatatctctgccttcttttcattctgaatttctttcagttcttcctcactaactccttttcctttgacaaaccttaatatgaaatcagattatattttaactatttatgaataagttttatataatctatactgaatgtttaaactaagtaagttgagaggtttttcatttctctgtgctaattacacattaattagtttaagcattaggttgttaaaaagacacaccggactcagattatactgatgaaacaactttaatataagcaagaaaatacattgcagcaataacaggagaaagagacgcattggaaaggtccaaagatctgaggctcacagttctttgtccttccacttgctgggtcacacagaacaagcttttattcatactggtggtctggaaactccaccagtacatgtgctaagacctcagtcctaggaagattaagctctgcttccggcagggtgtctgcaagtgagctggtcacataggcacattccagctacctaaccagcctcagccctcaaaatcgtcagctccaccaaaaccgagtgctaggcaaaaatctgattattttgttaaacaacgctgactggctggtacattctgccctgaaacaactcacagagttttactttggtagaagcatttatctttaataggtacattttagagtttcggccaagggtcagcagagctctaggaacctcgtagataagcatttggtcaattcagacctgctcagattaactcatactgtgcactatttcacataaaagcaaaatgtcaccaaactactttgctttacatttgagttgaaactaaaatggctcttttctacaagtctagagtcaatgttttcagaatagattctccaagcccaatttaaacaaaatggaagggatgtactgctgcaggcagctctttctcccgctggcatgcctccttctcagccctcaccttccacttcatctccaggatggccctttccacctcctccagggctcgctcccttttttccacagccctctcccgccattccactgccctttccctcctaagcacctccttttccctttggctggcccacaaagccatggtgcccacctgctccaggagcctaccccagttaccctcaatgcctgtggggagctggggcccgtggggccttggatcctggcgctgcccagcctgaccatggccactcttctccagctcctctctgtgcatgcttttcagatgcttccacagtgcagtggtgcccacgttgaccccagggccacggctcacctgcctgccacacaggcggcaggtggcatactggttgggatggtgcccagcacgagcaggagctaggtggaaatattcccatgcctcagagaaccgggtgcccttgttgtggggcattggagtgggcatagcactcacaaaagggccaaccagttctcctgtctcactaatctcttcctcctccttcatctctaagtccccttttgccttcatcattgttccctcctcttcctcgtcttcccgcctcatcatgtcacctcttctacagcgttctttatgatgtgcttagatgtgagccaaaagcttatttgaaccacaagattaaatatatatttgggaagggcctgtggtaactcttggggattcacaataatggccaaagtctggccacacctgggtggtgtgaggtttcttcctttctgcttcactggagagtcaggggtgagtcagatacaagcaaaacagcccaagagtgcattccttccatgccccagatacttacttatcctcccttgactaggccagaaagacaaaacatatcagttcctgtagcaaaggggttctctggtccaacaattacaaagctctttgatgaactcagtgttttctgcatcaaccaccacgacaggtatttttgaatattgaaaattttaggttttcttgtttctcctcctggttgtttccactgtttctgtgcttcttatttcctataattgcattttggaggcaggagaaacagcctcagggttcaggcttttcaggaccaacagagctagggcctcactgggtcttgctcaaagtaggtaaaagcaaacacaggcagatgctggtgcaggagacaatcttgcttcctaagaactgttgcaacaagcaatccagagtagacaaagcctatgaggatctggataataaagttcccaatgcaaggtcagtttgtccttagaggtgtctctcagaggccaggagtctaagaaatccaaaaagcaagctcagctgtttcagcaggaggagctgggatgcacagaggagaaggtggagcacatcttcacaaacacagcgttgcctggctgtccttagcaagcagctcaccatactccaccttctccaccaggatcacctgcaaagccaacagccaataagaccttcctgaggcaacttactccagatgttttgctctttacctcattttaaagataaataagtaaatggaaaatcatattacatttaaaaacagcccgacttctctctcctttcttgggtcatttcttaaactaatgagagctttatttaatcaagctctgcaaccgtgaacagttaggaaattccccccagccacaagtgggtacttacaagcaggcaaggctctggacttctctctgatctttcctgcgcagagtgaaagcactcctgcacaccttggatgtctattagctgactcctacccccagaaggagggcacctccagttctggtttcctcccacttctagggaagcattgtttccaggtaggtgtgtctgtgcctgttgggtttttctgcaacacttagacacagatgcaaaccttttctccaccccctccaccaccaagaaaaggatgttcctggcatatgtcatgcagcaaaacagtaagtcaagcacctacaagtcttagttctcttttttgatgactagattacctaacctctcaagtaaagcaagcgatttgaaggaggaagagtgggaaaggctgaaatattaaatgtatacacacatatatattatatatatacatacattatatataatatgcataatatatatatgtgtgtgtatacatatttagattgagaaggaaaacctaccaagaggagataggaagactctaaagaaggtatcaatagaagaagaaaaaactttgtgttataaaaggaaagatagaaatggcattgcaggccaggagccatggatcttgcctgtagtcccagcactttgggaggccgaggcaggtggatcacttgaggtcaggagatcgtggccagcttggccaacattgtgaaaccctgtctctactaaaaatgcaaaaattagccaggtgtggtggtgcacgcctgtaatcccagctacttgggaggctgaagcaagagaattgcttgaacccgggaggtggaggttgcagtaagccaagatcatgccactgcactccagcctgggcgacagagggagactctgtctcaaaaaaataaataaataaaatgaataaataaaaataaaaaaagaaagaaaagaaaaagaaatggcatagcagaaaatatgtagaggttgacagttaaattaaaatagaaaaaaaagatgggggaaaaagattcaaaataggaatgagactgggaggagttttagaacatgaaccacatttctaaaccaaatcttggaacgcaaagtctagagagagtctagaatgtttgaaatttggatcatttcagaaaatctgaacctagagaattcatgaaagtcaaatcttttcaaaatttttagacgttaaccagagttcttcagtgagccagttgccttcgtaaaataataacacccccacttactcctgatattaccatatcgtcatctttggtgggttaactaaagagaaaggaaatgaatcataagaatggttaatgtcactggattaatgcaaaactttgtatctttttctttttttaaaaaaacattttacctcctttacctttttgtctcttcctggaccaactggagataaaaatcaatctttggcatctattgaattaaactgaacactctcctttacttaataagaatgtattttagaggatctggttttgcttttaattttttagtggagagactagcatccctggcccatatatgtatccccattatctggaaaggcaagtgttgaacggatgggaatactgggagctacggtgtttgccacccagcatcttggatatgctagacaaccccctctgaaattctcttgtttcattgggatttctgtagcaatgtactgagaaatagtaaacttctgtaggatttcaccaggaaaatgttagttagcattctcgaatttggtttctcagctctataggcccagacttcttgggagtaactagtctgaggattggcacacaaatcatcacatacatttaattgttctttacatgttaactagtatattcattaattgtggaaaatatctgagaactaagaactagggctggtcatatgtaaaatatatacatctcttgatgagaaaacaagtaattataaaaggaattataattttgaagagtctcagataaaacaatgggaatccaataattctcactggatattttcaccagactgtaaaagaaagtatcatcccccaaagaacaaacatagcattgaaaataaaacataactagccctgcatctaagttctctgctttcataatatagttacttctttcatttttttatttcaatacaatttttattaaaaaatatgttggactgagattaaggagacatggtttctaattgtgccattaactattttccacttcctcgaaccactgggtgccttgatttttccattggtcaaatggcaaaaataaggcatgctctacctatccttaagattaagccaatgaattgtttttaaaaattaggaaaatgcttcacaagtaaaaagtaggatatttatataaatcgttttctgtgattgttacaaatagtgtcgtacattatttggagcacagaaacagcttgtagatccccttgagcttttaatctaacagactattcttctctggcctctgtttgctatagcttcttccttctattctttggtttccatttagtattattttattctgcctacacagagttaagatttctcctttacagaacccagaatccagacttggaacattagtatagtcctagatccttaagttgacctaggagtatagccagaagtttataacatctctataggagatagcccatttatagtgcacgttctaacacaacctatattaaaagtagacattgccttctatttattcagttaaaaatggagaaactcttttttgccaacttatatgaatgttagtaagttgtaaggagtaccagtttcttaggaatttgcaaataatcctttttctgtctttaccccagagaagatttacctgcttactaaagaatgtatttcccaaagcaaatatcacatggtttatagatggaagttttcttcatgatgaaaaagaaggtaaggaaactaatcaatggaaataagttcggtacaaaaagaaagaaaacaaagaacattagaaattgtcattgcccaagttgatcttggcatttaagaatgattctcattccaagaaaaacatcattctgcctaccaaatgtcattttctgatgcttcatctgtttcttccaagggggtggagtgtaacattttccagaataaaagaaatacaattgatttagacaaacaacatccaaatattttatttaactagcagtaaaaggaatatcttaaatgaggacaaaaagtttaagtctacatatatttattaaaactttttctgcctttataacatagctacctgtttttccatgtctttcttatttcaatacaatatgttcaattaacttagcaccgctgctttaaatcagccaataaataatttctacctttttatgtgagaatctgaggcaggtgttggtggagcactagagaaagcctatgtaaaagagttggctccttgacaaggtacatgttccccaggaggattaaaagttcctggaggaggaacacacatcaagacaagctcaggtgaaaattcacaaagccatgattttatagatagtaaccatgacagcctctaccagaataatctcagctgtccctgcctgaacaacagctattctcctttctcctgagtcgtttttcctccaagttcaatctgtcttcaataataactgagtcacacaactctttctgaattatttttattttattttattttattttattttgagacggagtctggctctgttgcccaagctggagtgcagtggggcgatctcggctcattgcaagctccgcctcccgggttcacgccattctcctgcctcagcctcccgagtagctgggactacaggcgcccgccactacgcccggctaattttttgtatttttagatgagtcggggtttcaccgtgttagccaggatggtctcgatctcctgacctcgtgatccgcccgcctcagcctcccaaagtactgggattacaggcttgagccaccgcgcccagccctttctgaattatttttaaatgataaaattgaaagcttatgttaatgagtgtattgatcacttgatgcattttgagattattattggttttattagtttatttttaaaaaaaattcacccacaacaatgacagaatgcaattctaaaaatataggttaaaagttattataggccaggcgcagtggcacacacttgtaatctcagcactttgggaggccgaagggtgtggattacctgaggttaggagttcgagaccagcctaactaacatggtaaaaccccgtctctactaaaaatacaaaaaaatagctgggtgtgatggtgggcatgtgtaataccagctacttgggaggctgaggcaggagaatcgcttgaacctgggaagcaaaggttgcagtgaaccaagattgcgccattgcactccagcctgggcaacaagagtgaaaccctatctcaaaaaaaaaaaaagttattataaatttattctcctgttaaataagccctgcataggcaaagcacccagatttcaccaaactagaggctagattttgtggtcagaattgcactggcacacaactgcatttagctattactttggtaagtaattacatcagaattggtgttaagaatctgtaatgtgaaaaagctgtaagaatccagaaaattctgacatatagtgatagttggttttacattaattttctgctgccaagtatgctatttggaggttgtactaacataacagtttaaaacagagtttgatttctaaagaagactcacaggacccaaaatgcaatgcttacaaatctacagcttatttcaagaagaggagacaacatagcaaaaagattacaatatgcagcatatcctatcctacacttacagccaggagtccagagaagtcagatatgagctccttcgtccttcctctctaagggccacagccagacacacttcctcgctcagatcagagactactgatatatacacagaagagctcagaagtgggtagtccaaaacggagtcccaactgagattgctttatattttactggtcacttaggtatattcctgcaacataaccagattccacagcagagctctcccaagatccgacctagactaggtataaattatcagtctcacagttgtcaacacacaatgctgatgagctgggataatctgccccaaaacattttggacacatggtcacaaacaaagcaacactattagtcaacatattttataccctgaccatggatcaatgacatgcaggagcttgagcaaacagctcaagttaatttcagatctgctgaaattgactctcactgcagagaagctgccatttgaccactttagactctacattaccacaaattgatcatgccatgccttggcattattgtatggctcatacataaaatgttagtgttgaaccatgttcgtatctgtctggcaggaatatatattactaatgaagagagaaaaggcaaagatggatttttggaactgaagtctgttttaacaagggtacatagtaataaaccagcccaatcagacaacttgaccatttggtgtatggctctgtctccagtcccaggaaataaagtgtggaacatctcatcagaaaagatcacttttctcttaggtgagttgtctatttaataagatcaacaagagtttgctaagactgccataaattcaaaatatctttaatgggaagattatcacttccataacgttttaatctcagaaaactttttatgtaactcaaaactatttcaagttatcaaacatttttgacaagtaggactccagtgaaaagaattcttcaactaaaaagaaaatagttgattcatgttttcacaagaatttctgctgcatacagaaaattttttgttccaatttaattcatcataactcttaattagttagcatttttgttaatccatcacatattgaaaattaatactaatactgatgatcaagaaagatttaaaagacctaaaattccttctgcatcattagaaacattccattatgtacaacatatatacttttaatatttaggaatggataaaatgtgtacaataaaaataccataaaaatagggattgtatcttaataattgtagtatccctaggttcaagcactatagttagctaatagaagatttttatgattgaaaattgatatataggattactctagttattatatcatttgactaaccagagtatttactaccctgaaccagatggaataatggagattttactacataaaagatgaactaatacctcaataaatacagtgacaacagatatgcctgaagaaaaatagaagcaatggcaactgtcagatattcatatttaacagtaatcttataaaacgtaaatagatttgcaaatcattattacaactctataggagcattgacctcttaaaccacatcctattttcagagatatcataatctataacatactcataaaaacacagaataatttaagaaggaaacagtttttctttgttacaagggcacaacccgcatcttgggttctgtccagctccttcacaggtgcagtggttggttatgaagaaaagtgtacccagcataaatctatccctactactcagaagcaggtgtgattctgatgccggggcactggcatcgctcccgtagccttgcctgtgtgtctgtgtatatgtatatgtatgaacacatcatcctgtgtactttgagttaatcattcagaaattgtgatgtatttacactaaaatagccttactcaacttcatctaattccctcaggaataagtcagctccttcctggaaagctggacataatagggctgcagtcttggaacaatgtggaggtagctgattctcacatagatttgtcagtagctttggcagaatctaaggatgtgagctaaaggaccctaaaagctcaaattcctaaaaagaaccctattcccattataggtagaaccatgtctgtaaaactaatattttctgatgttaaaacagtgcttgatttcagtatcagaaaataatgaatacctttttaggtaataggaagaacactgattctgatactgaaaacataccataattccaattgtatagggcagagcttgatctagtataatttggggctctgaacaggtggttaattttaaattgccaaatgagtctttatcctttatgatcaaatattaaagacaattaatctttaggagttcagtttctcaaaattatagcttacattctcatcccattctggcatatatctatgtgactgacttagaagatgtagtcaaggctctataaagcagtgtcatcactgtattatgtctccctattgttgcaagctcttaaacacttacttccacacaggctgtctgtctgtgatggtactgccggatgctttatgaactccggagtaaacttctgatgtgtggtgcaagagtcattgccttaccaagctatttattgttgacaagatactgagatgaagacacagaagaaaaatctgccatccctgagtgctagattagagaaacgctaagaatattacacatcaggaaagagttttagtgagacaaggggagaagttttgctctctttgatcccttttgcttccagaaaagggtattaatgttggagactgtgaggtaacagccctttgaggtgattccttctccacctacgcccagtctcccaagtgttcagtgatccctattctagaaaactcagacagggcatgggattagggttagggtgatcagtgactcttcaggcagctatttgtgcactaggacctgcagaattcccatgatccacagtaactaccactaagaaaaaaaagcctttcaaaaatatcatggaccaggcacagtggctcatgcctgcaatcccagaactttgggaggctgaagcaggaggattgcttaagtgcagaagttcaagatcagcctggacaatatagtgacactttgtctctaccaaaaaattcaaaaaatcagccgggcatggtggcgcacatcattagtccctgttacctcgggaggctgaggtgggaggattgcatgagcccaggaggctgaagctccagtgagccgtgatcatgccactacactccagcctgggcaacagagcaaggctttgtctcaaaaaaaaaaaaaaatcccgccctgctagcatgtcaaaatgtctaaaatcatggcactgctgagtctatttctggcagatttgaagagctgggttttgtgggttttgttttggggagtggataggagacattttgtcttgttttaatgcaaaagttgagtgcaataccccctggggtggataatattttggttgtcatctcccttgacagagatttgtttattaaatggatttctgactgtagctgttgagatcaagacctttgggatagaaacagagttaagcattgacagttgtgtaggtgtatgtgtgtgtaagtatgcatgtgtatcttcgcatgtagaaagaggagtaataaaaagatatcttaatagtggaacaggaggaccactgcatattggtgtggaagatgccagacaaatacttcctgtttcatgacttccctcagtgcagctggcctcatacccttgactgatcctttctgagagtatcagttgagaactttaatatgcatataaatcacccagggatcttgctaaaatacaaaaattctgattaagtaaatctaggtgggacctgagattctgcatttgtaaaaagaccctcaaagaaacatattctgcttgtctatggacaacattttgagaagaaaggacctagcaagccctgggatttggcttacttctaggtggatgagataagggcttatacaagctctgaggaaaccccggaattaagccagttgccctatgggacagacccatggctgctgctgcccatgagggtggttctgagagccctgccaagcctactcaaatggacacacccaggaacagatgaagtggctttaggcggcagcttaccctcttatgacattatggtaaatgcaatgatctggaaactggcagaggtgtttctgctaaattctgcatttgggttttgggaaactgtctctcctttttaggttttaaccactcttttcatacccctgagttttgttttgaccaaggcagagtttccactttacagtctaatctaaaactagacagacatgtttaggtcccacattttatgtggaaagctatgtttcccctctgtcacaaggcaaagtgttcatctcaaaatgcacatcttacaataatatcttcttaatacactatgaggctgaacacctcagcttacaaaatcacttggtgatgaaatatggcagaaaagtatcctcaaactgaaatgttcaatcaatgaaaaataaatgtttcccattgtggaaactgagcataacgcaccaatatcttctgttccaggaactggcaaccttcttctgtaaagagctagatagtaaatatattttaggctttgtagactttttaatctctatcacaattactcaactctgtcaccttagcacaaaagcaaccatggacaataggttaaaagaaaaaaagggaaaaactgtgttccaataaaatttttataaacatgatttcactgtaggccatagtttgccaacctctattttaatcaatatacagagaaaaacatctaggcatttattttccaagccaatgtcctgtcttattaaggtaccactttggaagataatgcttatgatccaccagctgtcagacacacacttaatgctggtcttctttctttcagtgttaagaataaatttgcatgcattgattcatctacttccatttgccagaatccataaatatggtgtggagcaaaacagtgacttcccttgaggggcatatatgatgacacagtgatgaggcatttgctagggtaaacactgaggggtgatcacatcacaaagatccccaggcttcctcagcttgagaaggtacattcaggaaagtttggggtcaggaaaccacataaattaagatcaagaagtcccagaagtcacagagagaatattgtgtttcagaaattgggttgaaatattgcttattggatagaggggattatttgagagagatggaaaaaatgataagcaacatcaggaaattgggagtgtaatgacagcccaaatcataattagacttgtgtgtcatgctgaagagttcaaacttattttggatgtatgaagaaaaaggatggtcattttgttaacctattcatatacttcccatataaccgtcctccacctcctcagagattatttgcacaaaagcattcatatagtagtggatcagagctagctatgagtgccacccacagccactggcaatagcagtgctactagcaataagaatagaacatacatgcatctagcttagaaaaaccaattcctcccacggggctatgtgctatcaagtgacataatgtaagtaaaatatacttgtcccttaaagtacattacagaatagaaccaatagtttaattagtaattaaacatccaaataattgatatatatcagcagatgtgtaacactgtaaccagtaacattatatctacaaaaatcataaaatcttctaacttcaaaatcatctaagcacatttaacccacatgttcctaaagtcaatagagccttctggcatttgtaaattgtccttccaataggactatttttaaatacagtaatggagatttaaggaattgacataaatgtaaaatataagtaaaaccacattctagcctctgtttcaactccccccaacacagacacacgcacgcacacacacaaaagaaaaagttgtagccaaacaaaaatattatgacaaaagttgtcatgttagaaagcagaaaaacatcacacatttactaatgttacatccaattgggtagttgtatcattgtttctactcttgctgatataaaaatttttgtgagtttatggattttgtaaactgcatgattacttttcaaacacttgaaaatattaaatgctataatagttttaccaggtcttggtaaagtgtaactttttccagggagccttctcagacctcccaatctttatcagtgccccttcgttgtgttcctgtggccacctatgctttccactgtcatggtactcaacacaatgcttggctgcctagtttccaggccataggccctttaaggacgatcccatgtcttcctcattcatcattatatcccactgccttgaccttaatagggccccaatattgatttgttacatgatgaataaataaaggaaagtgtatttaagaactaagtcaatactttatcttttgattacaatattttgttcattataaatctctttctaatcctttaaggttctgaaatttcctcaacagaccctccactgagtgttacagaatctacccttgacacccaaccttctccagccagcagtgtatctcctgcaagtaagaatgttttcacactgagctattgatttaaccaagcagattgataacgataaaatttcagcaaacttgcatcattcatgcctgtttcttagctatgacttttttggggctgaaattgggttttattttttaacagctttattgagatataattcacgtcacattaacttgcccatttaaaatgtatgatctaatggtttttagtatgttcacagacttgtacaaccatgactacagccaatttcagaacattttcatcatctaataaagaaactcctaaacatattaaagtatcattctcatggcttcaaagagttaacatagcttccaaaatcctttacttaaagccctgggaaaatcaaggtaaataaatattcagtgaggaatttaaattctgtatttattattaaataggttaataaatgacagtcattctccaaaacaatgttctcagtggggagtttaagagattggttgtaaatggggataggccaaaagaggttgaatccttttaaatttaaatttgttctggttcaaattaatgttgacaaagttgactggtaaggactatgaattcagccctcccatctgaggcatcattaataatggaggtcagtctgggtcagcaatgctatggcaaaggagtggcagtgactctcaaaacttgtcattgatgcaacaaatcataaattcccacgtctgtggcttttgtgtctaacaaagaaccatggtgactctctaatacacaaaagcttatattctatgtaaagtagaagtatggctctcatttctcatttaattaaaactatcaattttagctcaaaatgagaactgaaaatggaataaaacaaaagcagtcagtaggaatgaacaattcctttggctggtaacctttggcatgtagcctgcagtcgctgtcacaggttgatacttctcagaaaatgaagcaagtggcagaaaagcttgcaaaccacccatcaaaagtttcatatccatctgattttctcatgttcttaatgttttgtaatttttcttttcttctttttttgaagcctctttttcttctacttttaactcactgccggttaatcatggcatttttcatttaacaagtattagcatattcaaaaataataaaaccttaaatctctctagtatcctgtgtattagttatccattgctgcattaaaaatgccccaaattttagcaaaacatatattgtcgcatatggtttctgggggtcagaaattcaggagcagcctagctggaaggtgctaacctgggttctttcatgaggtgcagtcacaccgttggctgaggcttcagtcatctgaaggcctgactggaactaaagaatctgcttctaagctctagcatatagatggtctcagttcctcagcacatggtcttctctatagctctgcatacaatatggcagttggcttcctctggaccaagtaattcaagaaacagtgtgactaagtcaaaagccatattgcctttttatggcttagtctccaaaattgcatgtcattacttctgctttattttatctactagaagtaagtcactaggtccatcttatactcaaggggatgagaattaggctccaagtctcaaagaatctgtgaacaaattaaagccaccataccctgtcatttagaagtgtctgtaaataaaaggcaatgtggtttgatctttattatgagtggtagacagagcaagcattattgttcccacttgccagatggggactttaagacactgagagcttaagtgatcacatacctagtaagtgacagtgttttgcattcacaccacagtgttatgaccaaatttagttctcaccacattagacaccattttttctccagttggtctaaacatatcgtgagaacaggaaccgtatttgtttttcctcctagcacagagtagagagtcaaaaactattagttgaataactaactgaatgaatgaaataattaataagaataatgttccttcactatgtagatgttatttaatagattatttaatgctaaagaaaaaagataaaaatagatttctgccttcagaaaggttgcagtctacttggaagagaaggtatacacacataaaaataataattcaaaatactaagatgaaaggtggtgtaccttacagaattaaaatgcccagggagaggtacaaaccagtaagtattagactttgaaagttctttgtgagttcatgggctcagaaaatgttacccgggagagatgaaataacttgacctttgaagtatgtattgtatatatttgactcagtggagagctcgaaagaacgttctaaacagagaaaacaaagtgagcatttgtgcagtgacaaagatgtttatgggcatttgagaaagcatcagtagataagtttggatcaaagaggtggtattgtgtaccaaaaaaacagggatgaaaattggaaaatgcaaagtaaacaaagccttgagccccagtttaaggactccaaatgctatcctttatgaaatgggggaaggacctcattccactttattttagaaagaaagtggtattatttattcatcaaatatttattgagcacttactatatatcaggtacctttgtaggtgctgtgaatacagcaatgaacaaaactgaaaaaaaaaatgtcctcatggcatttatattctgctagttaaaagcagacatgaatttcttctagttgcatttttatggggttagtctacatacactaagtgcttatatcagtgcttacaaacacaattcttctgtgacaaaattcaaagcaaaagaaagcagttgttacacttcagaagcctacaatttaatatagttttagtattaatgaaggaaagaaagcacagtcaagtaccatatttgtttaaaaagcaggggggaaaaatgccacctgatctactatcacactaagacgatgtagttgggaagtctgtgcagactcaaaagacctccgtaaaacaaggttccaccacattggacctgaggattgtgttagataagtggttgtcaaccagggtaattttgccactccagaggacctttggcagtgcctggagacattttgggttgtcacaatgagggtaggagggtgctactggcatctagtgtatagaggcctgggatgctgctaaacattgtacaacacagcccagaacagccctcacaacaaagaattatttggttcaaaatgtcaatagtgccaaggccaagaagacttgttttagatcaaggcttaggtgtaattacagtaggtatctcttactttacaaaatcaaatctggatttctgtcaagatggcaacaatagtttatgtttggaataattttctgtttgattttgtatgtcaataaaactcatgttaaaccagtggcagattatgtctaaataaacttatctttttggaataatcactgaattactattgaaaaatccaaattttgccttggcaaactggagggtaattgtgaaatcacacgatgacttcctgcctcagaagctggtaggattcacctttgcatgttctttgaagaaaggaagtgagatgaagtatgtcacggaaaccaacttcaaaggctgtggtttcattccgaattctaagatgtaatgagctttataatccagtcatcattacgaagctgcatgtctggctgcaagcatccaattcttattttttcctcgatgaaaggatattttttaaacaaatgttgaaggtcatgaaagcaatattctttaatgaggggaggagaacttaataactcataacaaactgtaagagttatccagggaagcccagctcaattcaacctgaaccaattcgtgtttgctgagtcccagctgcattctcagcgcagttcaaggaagacaggctgacaagctaagtggcaagatgagacaagtccatgtggaacaatcagagacaactgatgaatccagggtggggctgtacagacacaattcaggagtttccgtcgccttgaggagagagccctgtgcctttcaattcactggctatgatttggctaagagttacgtagcctaagagatgccaacccggtgtggcaatcatccaagacacttattcatgaaactcataagtatggagcgcctacaatgtgtcagggacttttgaggtacaggatacagtgatgaacaagacagacagggctcctgttgcttacagagcttacgatcctgtgtgacccacttgccttgcctcctgttttactgcccatcagtccctttggctctgcctcctattgttatgtctgcacatgacccttagacctgatgatgttgattttaatattaagccctttctaaggacttagctggtcctcactatctgggtctttctattcctggatacttagagtaaaacactaggtccagtctgcctctaaccctcagccagcaccccaggtagacataactgatcttcggcaagtggatgatcagacattgaggggcacagggtaaaggaagcaactgaccaggggatgcaacaaaactactgatttatgagtaagcatgtcagaaatggtgggggatcaacccagaagacatgtcattagatgagattagaagaaagtaaatcagaaattcggcagttgataggggcattggattctagtgttaacaggggaacgccagagagagtctgcaagacagtgagaaggctccagtgatttgtttgtgatagcaacttctgacccctttgctagtcatgccatgcctgtattcaggtgcctcaattgctgtccaatagtttctgcctttatcaacatgtatctgctgctgaaaagtaagaaaagtcagtgagtgctgggggaaaggaagggggatcagggaagtcttcatgcagggtctggaagaaaatactgactcaggtggaagaaagatgagaaatggatcttcacattcgcatcataagcaaaggcgtaaaacaaaatgagtgcaggacatgagaagacaagcaggagttctgacattgcttgttgggagagggctaagggttgattaggtggggtggaacaaggtaaagatgagcttcaactcatttagccccaattcatagcccacagcccagcatgtctcctttatgctggactgaaggtcagtgcccatgttatcctgaccacgcagattgatgaggccgattcaaatgtgtttagatgtagttgaaggcctgtattgtccagttaatgtcactactgtgtttaaacgtcaactaatgggctatgaatcggggctgtgatctgaacaacaaatagccactatggctttttttgtatgtgggaaaatgtcaggaaaacagcagttatgtatatggtaggtgatagttgcaagagcagggagaaaaaagactaaatgatatagatttaaagtggtttaagtttgttttccatgatcacgaaggtggttaaaaaaatgatatgatctgaactagaatgggcatttgtagaaatggagagtgctgcaacagaggctcaccaggattgtctgcctaaatacagggactaaaaaggttttcagagaacaatcatacaaggacctttccattttttccctagcaattacataaaaatgtttaccaactgccatgattgtataataatactaagcaataatattaatatttgttggttgcctccaatgtgtatggactgttctaaactagtaaatgtattttctcattgaatcctcccaacaacacaattacttaggtactattattatcccactttacagatgaagatactgaggcacaaagaggttaaataactcacccaaagtcatgcagaaagtagatgagccagtattgagcccagacagacttcagaccttgagtcctgctgcctcaaagagtacatggttggtgctgaataaatgtctttagacactgaataaatcccttctagtgtgaagctgttataggtcttaggaaaaggtcaaacatgacacctatgcttatattaatctctccctttttcagaccagtgttttcctgagacatgcagcatctgagagtgaagataacatttcctcagttggaaataaattagagaaacccctcctgcatctgtagcccacccccgccatcaacactattatcatataattctcactgtagatatgaatctacagaatccatacaaaactccaatgcttttccttgaatcctgggaaattctgtttattgtatctttttcatcaccttccacctggggcacacaacattctgcagactgttaaaaggatttttcttttttctacatctgtcacctgtaagtcaaggttagccttcttgatgactagtttactttgggtattcatctattcagttactccccttggggtgagattcctcagggtaaaagctatcagttgacctatttttcagtttatttcataattattgagtatctacaagctcaccacatgatgcgtgatgagctctgtcctgcttactgtcatcttccccaagggagtcctgaaaccctttctggaccagtaatccagcaatacacattattattccccatttagtcagcacatgccccaaacaatctgcctcccacatgagaaaaattttatgcagggtttagatttaggtttaggtttcacacctcatgtctcctttatgctgggctgaaggtcagtgcccacgttatcctgaccacacagattgatgaagctgattcaaatgatgaagctgattcaaatgatgaagctgattcaaatgtgtttagatgtagttgaaggcctatattgtccagttaatgtcactactgtgtttaaaggctctttgtgctgcaggtgaattgatggagagcaattacacatttgtccagaaactagatggctaagtctaagtctgtgctatgccgataggtgctatagtgatagaatgaaaggcccaatggaaatatttctatttgagacaataagttaaatttttaggttcagttttacattggaataaggcaaaaccttagatagcagagtctgactaaccagataagttaaccagcagcttgaaacttacaaataacttttacctttgtacttggttgattaaataagctaaaccggtaggttagcaaagaataatttttactttttccattcttctctgttcaaatgagatatattgaataattttttcttggcctctaaaagaaatttcagacagattatttggcttttttggtgatttccatataataaatgtcatctggtccttttcagccacaagaacagacctgtgtcaataattaaaaactcttgtcaaatgtaatgtcaaaactcaaaaaagttaatttagtccagaacttctttcctcttccttcccccaagtgtggctctaactcaacttggaaacgctgggatatgtgaggtgggggtagggaagagacagggaatgtctctgattccctgacttggcttcatcctctcctccgctcctagctgctggcttgggtccctctttatggggaatggcgtaagaagaagagggagaggtaggtaaggaaggaacttccttaataggctggatgtaatctgacttaggtgtcctctggatgaggagaataaaaattgccatattgacttcatggggcactctggcagatttttcagaaatccctgactgtcctatggctgctgtcccttggtgcaggccatgcctctcttctggtcttctgcttccttctctctgcagcctctaaacttctgaaggtcagctcctcttgggggcttctttgttcctctaggtgttcttcctgagtgagattcttttcatggcaccctattatgtctggaaaaatgtgcacctttgcctactctatgggggaagtgctcctcttcaccagtgtggccctgtctctcttctccatgcccattcagagccactaaccaaccatggactcctaatgcagcctctccagcctgagtaaggcaccatgcccctttgtcctaaattccaggacacacaggtcaagagatatgagtatttctctcagatccacacttcgcttggtctaaagtgaaggagcggattcttcttcatcttctccatgagggagggcctgatgcacaggacccttcaaaggaactcttagccagtctgctcccaccccgtcacacagctttgaggttgatgatggaccaccactgacaggtcccactccacactgcctcgcatgtcctgcataggtgggctagaaccctgctttcaacgtgaggtggcttgtgccctgtattatggttcttaacctttggaacctcatctgaaatgaaggtacaagtattccatttaaaaattttgttctgcattaaccattgaagagttaaaggaaatacagtgaaaatgaagcaaacatgatgaggtgatggttaacccactgagaggatccacagaaagctgtagttcttagcaatagtgtgatggatggaagataaacactgagttctagaagcattggccaaaggtgaggatgcttgaggaacatgaagggagacaggagaatgcagaaaagggaaagctttcacgtgggtggttccttcttctaagggtgattaaaagcaacagaagagactaagcaaacaaaataccttctatagcacttggttcacagtaagtgtcaacatgttgtattctattattagaacctctaaatccatttggaaatacagtaagaacccaaggtaggaaatagagtggctgattgaccagtctgtctttgtctaaggggtgtgtgtgtatgtgtgtgtctgcgtgcatgtgtgttttaataaaaataatctaggtttagaatgaaagcaaataatctaggtttagaattatgtatctacttgagatagatactgatgtaaacaaaaccaggctcacaaggaccaacatctagtgaggggaggagggaagtgggcagtaaagatgagcagaaatctacagttagcatgaaaagccacattataccctacttgatatatcccccacgactgccctctccctttctcttgctttgctcagccaagctagcctcctagctgtttcttcaacataccaggatttctctcatctcagggccttttaacctcacttcctatgcctgaaaaattcttcccccaaatatctacatggatcacaccctcatcttctcgaaatttttgttcaaatgtcaccttctcgatgaggtactccatgaccatcatattttaaattgcagctgcctcccaccccatttcctgttccccttttttggctgtattttctccataacacattttaacaccgtctataagttacctgtttggctcctctccacacataaaaaaagtaaatctgatgagggcagtgttttttatcttatttgtctactgatacagctgtatcacctagaacaatgataacacatggttaccaataagtattgataattcagtaaatattttttaaatggagaatttttttaagtataaaaaagaagagattaacaaaggaaggctttagggaatgcagaggatatctccctaaagaaaagccatctggctagggctgatgtctgggtagccttatgacaggaagctgaaaggtggtggtgggacaggaagctgaaaggtggtggtgggacaggaagagaagctatcaaaggcctgctattctgggtggttgcgtgctagacatcatgagtgagctcttccgtggctaggccctgatgatgatgatgcatgctgcagcaaggctaactacacttataaggctaccagaatggaataaatatagtctttagtgtcagacagccttgggttcagttgttgtctctgccacctactggctctgtagcctagagcaagtcattctgatggcagcagctgcccgactggactagctgctgtggggatgccagctgtagtgagggaggcctggctgggactgttgagcccgtagaggctgagaacaggagggagcctgccccctactgacttggcaaggcaggagccctgggctttcagggcagctgcagccacccagctgtggctccagaccctgacacccctgctctcttgagggcctgggaacacccccgcttctgcaggctcagaagggcctgcttccaccccctggactcttcccactcccagcacctgctccaatttcagagcaaagatgaggctcagcccaggcactgtcacaacctggccaggtgtgtgcacacttggggcagcactgacacaccaatcccccaccttggccccctccagactttgggcgccaaggagcacaggaaggaggcagcaggtggagatgggctgagggcagctgggtgcaggcctgcaggtgccatttggtgcaaacagcctgggctatggaaggcatgatgacagtgggaggctgactaggttcctggatggaaaggtgtaggtccccagtgaaaccccaccttcaggccaggcatggcctgaagcctgggagccaggctgccagttccaagtgaagtccatggatatgagtaataacttcatcgatgaccactgggccaattggatagtgctttttcctggcctgcctatggccatctatggaccaatcaccatgcactttctcccttctgagcccatgaaaaaccggggattcagccagactcagaaagaagtcaagactaccagctgtgggagggagctacccactatgggtctcctcatccagacaacttgcctgcagaaaggagctacccactacaggtctcctctccactgagagctggacactcattgggacagcctgcatatggaaaggaactacccacttcaggtctcctgagagctgttctgtggctcagtgaagctcctctccaccttgctcaccctccagttgtcagcatacctcgttcttcttgggggcgagacaagaacttgggacctactgaatggtgggactgaaagagttgtaacacaaacccagctgaaacacacctcccacctgctcaccacattgcaagcaatgagaaggagagaagagctgtggcccttcagggagcccagacctaaggcctcccaggccagggctgtaaaaccctctttggagctctacagttcctggcatctccaagctttctggtgccacagtgttccccttgtccagacaccagtgcctgcagcagaaactgcttgccatacatctggtccagcagcagcatcacacagagtcggcacccatgctggagcctggagattcccaccctgcctcagcagccagtgtgcctggctgtgtgcagtggccagaccccacgctcactcgttcacacaccccttgctgctctgcacctggctcacccttggcaggtgtgggatccaggctggtagcacagaccaagcacagcctgccaaaccaagtgggtggaatgagcccagaagtgtgagcaatactcaggcagaaggtgccactggccacagaatttctggctggcaaagcaagacctcaaggatcccgtgacaatttcacctctgtagtagtttccttgtcttaaaaaaatgagagtaacattatctagttcatacaattattaggagaatcaaatgtgaaagtgcataaaaaacaacaatgaagctacgactcatactgtccagtttgagaagaaatgtcatgattaagagtctagtaagcaaaaaccatctcaaaataaatcaagacctttatatgtaatttttaattccttgaaggaggaaacaatgaccaaatttatttctctcttttttttttttttttttttgagacagagtctcgctctgttgcccaggctggagtacagtggcacgatctcagctcactgcaagctccgcctcccaggttcacgccattctcctgcctcagcctctcgagtagctgggactacatgtccagctaattttttgtatttttagtagagacgggggtttcaccgtgttagccaggatggtctcaatctcctgacctcatgatccacccgcctcaacctcccaaagtgctgggattacaggcatgagccactgcgcccggcctcgctttttttttaagttaccagcttattctttatgctccacttatgctactttgcaactgctcacttgcttcttttatttggcatatagtaggtccatattaaattatttttaaaatctatgttgtttggaaaatatttcagtatttcccaaaagttaatcaaccataggtcttctagccttcctctacctttcctttctctagcagttaggtcactaggaagactggcaagagtataggttaagagattcagttctgcttaatgatgtcacatggagatgaccagaattagctcttttagaacatgtttctgtctgcccactcaattcagcactgactggagctgtcttctaacttaattgaatttccagtgatagcataaaagggtgggtttttttttattttagtgagaaaatttttaaagagttaaaatagaaatgagccaggaaggcttcaaacctcctcatgtaacctcatggccatttctgagctagtataaacaaaacattttgtgtgaagtagtgtttacctctaaatttcatcttatttcctggagacatgggtcattatagtgtaactctggatacttgcaagatttgataataataaacatttacattgaagaaggaataaacaatcagcaaacaaagccatcaactccctatcacagagtttgtcatcttacttgcctacatagtatctcatgatttagaacacactattgaatattgaagagattttgctatgttgtgaaatataaacttagccttaaaacaaaaggtacaaagcaagctttctcacatctggaaatatatgatcaatatgaatctttcaaaaacatggctatgaggaatgcaaataaaattttttaattctctgcatgatatcaagagacagtcagacatgttcttatatagttacagaatctccaggtcaggttctaagaagggattttttaaaacaaaacaaaactcctaagaaataagcagtgttgctgcacactgtgccacagtttggtcactgttctcctgctgcttttgtcttggatatgcactttggcaggtaacgccccacctagctctcacatccagttcaactcagcacatggaaaaaacacccctgagggcttgtaaaagcccagccctggaatggacaggtgccagacatggctattactaatccatgacatgtgagaccacacactgggcttttgcatggctatgccctctgcctgaaagctcccaccctccctccgctggccacaatctcccactaaattccttgggaaagctttcctgggattctgactgggctacccctgctttaatatgttctagcatttgaattggcttatgtgatcgtctggttgatgtccatctccttcatgaacttaaactccaggagagcagtattcccagtgccaagcacagtgcctgaaatttagagactctcaaatgttggttaaacaaacaaaaaaaatgtatgcagggagtatcaagagaggactatgtgaaggtttttagagatcaggtcatggaatgtgaaggggccttaaccttgaaccacagtgtaaagtgggagagagaggggtagatttaatttatctaggaactacatagttctctaaaagactttaactctgacttctacataatgagtgaggtcccatagtaaaggggtcattatcccaataacctgtcaagttggttcagaccctcaagtgaaagtctaaagaaaattcagctggagaccaataggagcgaaataactttgtgctccctggggaaagagactaggagactaggtatcattgatctttttgttccccacacttggcatgtattcagccctcaatgtactccacagcactgtgtgtgagaagggtaaagcaacatagatgtctaagttggggcagagacatagtcacacaaggattaaggcagcatgcatccctgaggcatgtttctcccccaacaaggtccctaaataacataataggtagaatcaaatgagtgagttctccttctcctgcagtaacccttgagaaatgatttatgtcacattattttctgacctccagaagagaacatttaatcagtcattttaatataaatgaaattcccaatcaagttatacttcatcaggattcctgtgattcctgccagaattaaatcacatgtcctggtcagtgccagcacccagtgtgggcaaccaggctggcataggaaagtgtctgttgcttgcaggtaagatatatttttaaaggctgctggcagttgcttattagactgagatttctaggtagtggtcatgtagtttacaaataaatattaagttctttgatgtttatttcctagatctttttcatcatcctcattatgacaattgttatcatagcaccactgttaagaacaattcctttgaatttacttaccaagtctctcagcaaatacttttggaggttaattctcagcatgagagagagaaggtaggggaggaaggaggaaagaaccatctttattcattaggaagagcctatcatatctctcagtatctcacagtgttcaaattacttatacctaatttatttattttcttctatataatttttaccttgtcttgtcccaaaaggaatatgaagtaactttaaaaatacataacaatacagaattttgaaaagaggtaactgaaggaattgctgcagagagaacaaaagcaaagtcttcttaatgacagaaataaaattataaatcacttggtgatccataggtttgtaaaatggtataacaaggcagttgtccagaagcacagccgctcttaatgcagagactgcctgggccctcctctagagggcgtggtggagcacagtcccagggactttctcactgcaagtgaacaatggcgacccctccccgcatcgtattagactgtcatctagtgtcagccaatgggaaaatcctcagtactatataagagcaattccacagtgactaggaatgtagttccaatactcagttcaaagcaatctacaaaagcatcatatatgctttaggtagtcaatcttgtgcaatttttctattaatacagcctttgatgaatggtgggaggcagtgagctagaagttacaattaccgcacaagaatctggtactgatggctcagtgggatggcagaggagaagaattgtaggtgattctgccagtgagaagttattaccctaccacaaagctaatgccccagcctactatcacactctgtatttctgactattagcccttttctagtgcaacactttggaatgtagttcttgacttgggccaggcctggggaagaaagaattagttaccttagatcaactttcttccagaaagaccaaggtaaatggggtaattgtggaactcctcaggagattcaagtggcctatagttagaatatgcttgtattatcaacatctgctaaactgcaagtgacctattttacagattctaagacatactttttagcatttactacatgtcaggcactcttctaagtattttatatgtatgactcttttaatcatgaagccacggtgtgtaagtatctttttgtagttcattgataggctgcattgcaaaaaaaggttatcattgatgacctctggatgtgaactacttataaatgcattaaccacaatgccaacttattcatttgatttgattgcccatgttctctatttaaggcatgtcctttcacataactgaggtaccaggaaagctggctgccattcactaccaactaaagcttgaggatgaatgaacatactggctatcatactgtaatgatattttataggatactttacacaattatacagcattctttttatgaagatctggggaaaagtttctttttaatcacaacaaaaagaataactatttctctagctattcataataatactgtttttatcttattatattcatcaagcacataacctatactctttatttcttagcacttcctaccagaaaggtcagaccaaatgtggggcccacatctactaagagcataagacatcaggaaatgcactttgtccactatccctgtttaggtttcaacaggactcaacataatttttctactgtattttccttgttcctattttgcctttctgcttttatcttcttgtattgcacattgatataaaccaccttaaatacattttggaccaaaagagaaatgcacacaaaatgtatttaaaatttttatttccaagagatataaacctgatttcaatggactgttgttggatattcttctttaatctaccttgctttatataatagttctaaaatatagagctattttcaaatgaatatgaatcagtctttcattttgggggagtgagggggaaggaagagaatgtaacaattatggagtataaagatggagaaatgactttgcaaactaacaattgaagtaaatatgaaaccatatttagcatgtgaagatacggttttcacagtagtatttgtgaaaattcactataaggtaagtttcatgagagcagggaccctgtcttcattgtttattactatatccccagcgtgcagaatagagtctggcatacagtagacactgaaataatatattttgaaagtatgaatataatacatttagaattaggaaaccgggttaatagcaaagaaatgatattggatattgattatttaaccacaagcatattccttttggattcggtttcatcatttataaaatgaggctgttcactaagattctttccaactctaatattccaggctcttgttaaatgtagtggcacagttaaacatacgaatgtaaatacatataataatttgggaattttattttcaaaataggatatccagctacatcttcagtgacccttgtagatgtgagtgccttgaggccaaacaccactcctcaacgtgagttcagcaaagttttcctacatgattggaaagagacaacacactcacaagttttactactgcttctataatgttgacgtttcagcaaacagctgtatttttcatttgatgtttgttaatatcttggttttgggttactctgcggtgactatatattgatatgacaatttctataatcttaaaaaataagggctggtgatttattatattgtatcttttatttgtcaagggattttaaggtaatattaaagtagtcttcacaatactctcagtgatctgagtttgtgacaagaacagaaaaagaacacaaatcagtgacaagctggcattaaacataaactacagagcttttgcttaatatgccagctagtgttcctgcatagggaagcacattttcaatttcagatttccccaaagtcacatagattaaaaattctgtgcatcaaagcaaagttaaattacagctttcgaaaaaagctggattctgaaaataattttgtctttcagccagcaattccagtatgactacccgaggcttcaactatccctggacctccagtgggacagataccaaaaaatgttaagtataatcgtgggtcccttgagtcctctggacttcagtcattcatccgacagatatattgaacgacatctatgtgctttgtttgtaataatatttgcaaatgttcacaaagcatctatcatgtttaaagtattgttgtagattctgagactacacccatggacaaaagagatctaagctccaaattctgattaaggggagacagacaagtggtgataagttatatgaaaaaaaggcacaggagggagacagtgggaatcgagagtgaagggttgccattttaaatgggcagtcttgaaaggtcttactgaggaaggtgacatctgagcaatgctataaccagtcaacccgaaagagcaagctgtgaatatatttggggaaagagcaaactagctagaaaatgcgtatcagtaataaaaatgaaaagagagagaccaacgtgagtccagaaattgtttcattcttccttttaatctggccaactagcagtagagtctgtaagtgctgctttagcagatacagacaggatctgaagaagaaatatattgcctcttagtggtattagacaacgatcagtgtggtggggaagtggtaaggaaggaggctggagcaaaaggagagaggacgatggatgccacagggccagaactctgaatttaaatgttagactctttgccacaaagcgtaatgtgtatgtccctttggaaagcatttaagttttacagttaaaacctttaaaaatatttcatatactcttgctccctcattcctgggaacttgtccttaggcaagaaagagagaaaaagaacatgaataggactgctctttgtagcattgtttatttattttatctttttgatggccctcaggctcacagatttgaattaatcataatatttaattcatgagacactttcatcattggtcgatgcatgaccctctgtaatttaacatatttcttttaataaatatgttaatgtaatagacacccatgaacccagtacccaaatataagaattgaaaagacagtattcagaagggggagcatagaaagaaatctaaaaataaatggaacttaagtgtctatcaaagatggtgtggcagattactgtgaaaagaggagactgttcagcaaaaggatctagaaatagtgattattgataagaaaaaaaattaaaatgtacccctgccatgcacattacacaaaaataactctatatagtttaagatctttatgtcaaaagcaaaacattaaaacatggaataaaataaatgtggatttcctcctgctttggagtagggaagggcttaacaaagagacataaccataaaaaatatgtaaaaattagaataaaattaagaaacttgggttcatcaaaagacgtctttaaaaagtaaaacaaaaagcaagctataatctggggaacatatttgccacacatataattgaaaatgaatcaggaatatataattgactaaggatcaaaattttacatcaagagattacaaagaatgcctacaaattaataacaaatatgacaaaataaacaaaagtcacaccacaaaacatgaaacacacgtggctagaaacatctaaagaaatgctcaatctcggccgggtgcagtggctcacgcctgtaatcccagcactttgggaggctgaggcgggtggatcacgaggtcaggagatcaagaccatcctggctaacagtgaagccccatctctactgaaaatacaaaaaattagccaggcgtggtggtgggcacctgtagtcccagctactcgggaggctgaggcaggagaatggtgtgaacccgggaggcggagctcgcagtgagccaagatcgagattgcgccactgcactccagcctgggtgacagagtaagactccgtctcaaaaaaaaaaaaaaaaaaaaaagaaatgctcagtgtctctggtaatcaggaaatataaatgaagactagaattagaaaatcattttatatgtaatcagtttacaaaaattaagaaatctgatattgccaactattgaataggatttatccagcatcctttcaacataatttcttatatgttactggtggtaccatcactttccaccatcctttggcattgtatttcaaagctgaatatgtgcatacctacaatccaacaattctattcctagatataaaaatccctccaaaattagtacatctatgcatgagatatgcacacaaatgtttggaggaaacactgttcatatagcaaaaactttaagtaatctaaatggccatagtcaggaggacagataaataaattgtagtatactaataaaatataatattaaagagcaatgaaaaacaagtgaatggcaaccatatacaacagcatgaatgaatcttaataacattatgttgaattaaaaagtaaataccaaataacaacatatggcatattttctaatgaaattttaaagcaagtataaacaccatatgccttagacgtaatatgtgatataaaattttaagctttataagtgaataataattataaacattcaggacagcatttgcttttgatggagatataagggatgagacagggagaaaacatgtataaatctgtgtacatgagtaggagtgagagggtattaagagggtgaaaaatatgttcagtaataagaaatggcaaataggatgagataactcaatgaaatactatgaagccagccaaaacaatagccataaccctgatccgttcttcttcactgggcaggacctcacagctggggcctccagccaccccaccagctgtattctatggacagaactctgatgtctccttgggacagagtgccttgtgggaggggtgggccatcaccttggttgtttggatgactcagcccttccagcctgtaggcactggaaagtccaaacggaacagagcagaggcagttccacaacacagttccccagcacagctgttttgttaaggaatgaccagactgcttctttaaacagacccagatccattcctcctcactgggagggtcctcccagccagggcctctggccagccccacccatgttctatggccaacagagttctaatttcttcctgggacagagtgcccagtgggtgaggcagacatttgctgtttgggcatctcatccagttcaggctgtgggccttgaagagcccaaatcaattgggtgctgaagagatctccaacatagcacagctgctctaccaaaatgcagccagactgcatctttaagcaggtccctgattccattcctcttgactgggtgagatcttccaactggaatctccaaccacctcctacaggcacggtcaggccagcaacaggtcagtacccccctgggacagagctttcagaggaataggcaggtggccatatttgctgtttcacaaccttcactgatgatacctccaggtactggaaaaaccaatgtgactagggtctggggtagacccgtagcaaaccacagtagccctacagaagagtgcccagactagtcgttcaaagaaaacaaataaaacacaacagcaacaacaaaacaaaaaaaccatccaaaggtcagcaaactcaaagatcaaaggcagataagcccacaaagatgagaaagaattagcacaaaaacactgaaaactttaaaaaaagaaaaagaaaaagaaaaaaaacaacaaccagaatgctccctttcctccaaataatctcaacacctgcccagcaatggttcagatctgggctaaggctgagatcactgaaatgacagaagtagccttcagaatatggataaaaatgaagttcactgagctaaaggagcacattgtaacccaatgcaaagaagctaagaatcatgataaaacaatgcaggagttgacagcctaaatagccagtacagagaggaacataaccaatctgatagagctgaaaaacacactacaaaaacttcacaatgcaatcacaagctttaatagcagaatagaccaagtggaggcaagaatctcagagcttgaagattgtctttctgaaataagacaggccaacaaaaacagaaaacagagtgaaaaaaatgaacaaaacatttgagaaacaggggattatgcaatgagactgaatctatgactgattggggtacctgaaagagacaagaatggaaccaacttggaaaacataccatccaggagaacttcaccaacctagcaatacaagccaacattaatttcaggaaatacagagaaccccagtaagatactccatgagaagatcattcccaagacacataatcgtcagattctccaaggtcaaaatgaaagaaaaaaatggtaagggcaggcagagaaaaaggccaggtcacctacaaaggggaagcccatcagactaacagtggacctctcagcagaaatcccacaatccagaagagattgggagcctacattcaacatacataaaaaagaattttcaacccagaatttcatatctggccaaactaagcttcatacataaggaagaaataatatccttttcagacaagcaaatgctgagagaatgcattaccaccagatctgctttagaagaggtcctgaaggaagcactaaaaatggaaaggaaagaccattacctgccactacaaaaaaacgctgaagtatacaggccattgacattatgaagcaaccatataaacaagtctgaaaaataaccagctagcatcatgattacaggatcaaatccacacacagcaatattaattttaaatgtaaatgggctaaatgccccaattaaaagacacagaatggcaagctggataaagaaccaagacctgtcagtatgctgtcttcaagagacccatctcacatgcaaagacacacagaggctcaaaataaagggatggagggaaatttgccaaacaaatggaaaacaggaaaaagcagaggttgcagtcttagtctctgacaaagcatactttaaaccaacaaagataaaaaaaaaagacaaagaagagcattacataatggtaaatggttcaattcaacaagaagacctaattgtcctaaacatatatgcacacatacaggagcactcagattcataaagaaagttcttagagaccctcaaagagacttagactctcatgcaataatagtgggagactttaacaccccagtgaaaatattagacagatcatcaaggcaaaaatcaacaaagacattcaggacttgaactcagctctggatcaagttgacctgatagatatctacagaactctttacccaaaaacaacagaatatatacattcttctcatcacctcatggcacttcctctaaaatttatcacataatcagaaacaaaacactcctcagtaaatgcaaaagaatggaaatcataacaaagtctctcagaccacagcacaatcaaatgagaactcaagattaagaaattcactcaaaaccatacaactacataaaaattgaacaacctgctcctgaatgactttcaggttaataatgaaattaaggcagaaatcaagaagttctttgaaaccaagaacaacaatacaatgtaccagaatctctgggacacagctaaagcagtgctaagaaggaaatcgatagcactaaatgctcacatcaaaaagctagaaaaatctcaagttaacaactaacatcacaactaaaagaactagagaaccaggagcaaacaaaccccaaagctagcagaagacaagaaataaccaagattggaactgaaatgaaggagatagacacacaaaaaacctttcaataaatcagccaatctaggagctggttttttaaaaaagattaatatgataaatataccactagctagactaataagaagaaaagcgagaagaatcaaacacaatcagaaattataagagggatattaccactgaccccacagaaatacaaacaatcgttagagaaaagtataaacacctctctgcaaataaactaaaaaatctagaagaaatagataagttcctgggcatatacaccctccaaagactgaaccaggaagaaactgaatccctgaatagaccaataacaagttctgaaattgagacagtaattaatagcctactaaccaaaaaaatcccaggattatatggattcacaactggattctaccagaggaacaaagaagaactggtaccattcctactgaaaccattctaaaaaatttaaaagaaggaaatgcttcctaactcattccatgaggccagcatcatcctgataccaaaacctggcagagatacaacaaaaaaagaaaacttcagaccaatatccttgatgaacatcaatgcaaaaatcctcaacaaaatactagcaaaccaaactcagcagcacatcaaaaagcttatccaccatgatcaagttggcttcattcccaggattcaaggctggttctacatacactaattaataaatgtgattcatcacataaacagaactaaagacagaaaccacatgattatctcaaaagatgcagaaaaggccttcagtaaaatttaacatcttaaaaactctcaataaactaaggattgaaagaacatacctcaaaataataagaaccatatatgacaaacccacagccaatatcatgctgaatgggcaaaatctggtagcattccccttgaaaaccggtacagggttgccctctctcagcgtttctattcaacatagtattggaagttctggccagggcagccaggcaagagaaagaaataaagcacatttaaataggaaataaaggaagttgaactatctttgtttgcagatgacatgattctatatctagaaaatcacattttctcagcccaaaacttcttaagctgataagcaacttcagcaaaatctcaggatacaaaatgaatgtgcaaaaattgctagcaatcctatacaccaacaacaggcaagctgacagccaaatcatgaatgaattcccattcacaattaccacaaaaaagaataaaatacctaggagtacagctaacaaaggaagtgaagagcctcttcaagaactacaagccactgctcaaagaaatcagagatgacacaaatgcaaaaacattccatgcacatgggtaggaagaatcagtatcatgaaaatgcccatactgtccaaagcaatttatagattcaatgctatttccattaaactaccattgacattcttcacagaactggaaaaaaaaaaaactattttaaaagagcccaaatagccaaggcaacccaaagcaaaaagaacaaagctggaggcatcatgctacccaacttcaaactatactgcagggctatagtaaccaaaacagcattgtactggtacaagaacacacacatagacgaatagaacagaatagagaacccagaaataagactacacacctacaactatctgatctttgacaaacctgacaaaaacaagcaatgagaaaaggattccctatttaataaattgtgctgggagaaatggctagccatatgcagaaaacttaaactggaccccttccttacaccatatacaaaaatcagttcaagatggattaaagacttaaacccaaaactataaaaaccctagaagaaaagctaggctataccattcaggatataggacgggcaaagatttcatgatgaagatgccaaaagcaattgcaacaaaaacaaaaattgacaaatgggacttaattaaactaagaagcttatgcacagcaaaagaaactatcaacagagtaaacagacaacctacagaatgggataaaatttttgccatctatccatctgaaaaaggtataatagccagcatctataaataccttaaactaatttacaagcaaaaaacaaacaaccccattaaaaagtgggcaaaggacatgaacagacagttctcaaaagaagacatacatgtggccagaaacatgaaaaaaaagctcaacatcactgatcattagagaaatgcaaatcgaaaccgcaatgagataccatctcacaccagtcagaatgtctattactaaatagtcaaaaaacaacagatgctgatgagggtgtggagaaaaaggaatgcttttatactgctggtggaagtgtaaattagttcaacattgtggaagacattgtggcgattcctcaaagacctagatgcagaaatatcattcgacccagcaatcccattactgagtgtatacccaaaggaatataaatcattctattattcaagacacatgcaagggtatgttcattgcagcactattcacaatagcaaagacatggaatcaacctaaatgcccatcaataatagactggataaagaaaatgtaatacatatacaccatgcaatactatacagtcataaaaaggaatgagatcatgtcctttgcagggacatggatggagttggaatctgttattttcagcaaactaatgcaggaataaaaagccaaacaccacatgttctcgaattttctccatgtcagcagtgttatcatttatgtgttcactgaggtggcacttttagttgccttcaataactttttctttgcattcacaacttggctaacaatttggcccaaaaggcctagctttgagcccatctcagcttttgacgtaccttcctcactaagcttaattatttctagcatttgatttaaagtgagaaaagtgcttctcttcctttcctttgaatacttagaggctgttttaggattattaattggcctaatttcaatattgttttgtctcagattaaaaaaaaaaggcccaaggagaggaagagggatgggggaaccaccagcaagtgaagcagttagaacacacacaacatttatcaattaagttctccatcttctacgggtgcagtttgtgatgcctcaaaataatttcaatggtaacatttaagatccctgatcacagattaccatagtagatataacaataatatgaaagtttggaatattgcaagaattaccaaaatgtggcacaaagacatgaattgagcacatgctgttggaaaaaaaatggcacctatagacttgcttgacacagggttgccacaaagctacaatttgtaaaaaaataaaaataaaaaaaacaaatgcagtatctgtgtctgtgatacagatacatggtcaggcacgcctgcaccaatttctgggggcttcatgggtttccccatggttaaggcataagccccatacttccaaagcttgtgaatgtcatctttgtcagcaagagtatgagggccacatttgtggaccaggtggacatggcaaaactgggcacagaagctagcatcagtgtgtgcatcctggcggcagaggtggtgctggcccagtacatattcaccttgaaaaggaagatgagatgaaaaatcaagatcatcaaaattcctgtgtccaggccttgtatctccggatattgtttgccacctatactgttgttcaaggacaaaatcgaaaacagaagaactcagaatgccttaaggagtattgaatagctaagaagttgctcatcaaaagtctgctgtgcatgtaaaaatgatgcaagaattccagaaaagttcagtttgcatcaagaaccctgcaaaaataacaaattatctgtggttttattaaaggaagatgccaaactttagtaataatggactttgatatgacactaagtagattttcctaccaagggaaaagatgcctaatgtgtcataatatgattgacaactataaacttgtcacaggtgaatgtcaaagaggttattgcaactaaaggaaaaatattttattattgaagttgaacctgttaacttcaagagaagtacccatttatggtagaatagtatgctgcccatcaatagtgtctttgttgaacaaactttaccaaaaaatgaaatttaaagaaatcgtggaagaatctgatgttatgctcaaggaaggatataataatttacttgagaagctccaataacacagtattcatgttcatattttcagcagatactggtgctgtagagaagtttatcagtcaagctggtgtttatcatccaaatgtcaaagtagtgtttgtttgtagatttgtgaaaatgtgtactcaaaggatttaaaggagaattacctcatgcagttaacgaacataatgttgccttgaagtacacagaacatttcagtcaattaaaagacaatagcgacagggcacggtggctcacgcctgtaattccagcactttgggaggctgagtcaggtggatcacctgaggtcagaagtttgagaccagcctgaccagagtggagaaaccccgtctctactaaaaatacaaaattagccaggcatggtggcacatacctgtaatcccagcttcttgagaggctgagatgggagaatcacttgaacccgggaggcagaggttgcagtgagtgcgattgcgccattgcactccaacctgggtaacaagagaaaaactctgtctcaaaaaaaaaaaaatagacaatagtaacataattctgctgagactcccaagaagactttaaaagggcatacaaattagccaaattttcacattctgaaaattagatccctaaatgatagagtggataagcattcaggaaagtattgtttcatcaaaagatgaatcactagaagtagccaactccatcttacagacgattctataaacaagcattcttcaggatgttctctcctgcaggagcaagagataccagaattgttcatctcttcatcttgctgaaaggctattttttataatatctttctggtcttgaaagtttacctttatgtatttaagtgttttcagacatgtggaatccatcaacgggaaactccattttcttcacctctctcaccatacttcccactacatgttattaacagattaaaaacaaaacaaaaaacctcaaagtcaaaattagaaaaataactccctacttttccaaagtggcttatgttttttaattttttaattattttgaggggtcttttaaaattgggaaagttagtagaagtccaaaaagaagtttcatgaaattacaaaaagaaaatggcataattttaagtgttgtaatgtttgtaatttgtaattgtgctgatggtatcaccatctcctgaaatcgtgttatgttaggctattttgcttggggaaaatcaatattgaccagaaaagcctggcactgtatacttgctgaaaactattagtgtccacacatcattaaccattacaaaatgttctatattgactcactgataataaacatgaaatggaaaatatttttaaatacccattttccttaaatggattgtgcttattcagccatttagactttagcgtaaattaatttatcccattctttcttgcaaacatactttgatgagatacaaaataaagacatcaaggtcagaaagtaagaaaggagtcaccataccatattgagcaaaaaactacaaggttattcagaacaaacttccttcttcataattttacctaaatctaggcctagtcccaattgtttttcagttagttattgctctttggaaatcaaattccggcgaatggcataatcattaaaaaattcttagtccatcatcatcaatagaccttgatattctgtctagaacaaaaattaatatgcagtatcagagagttatattgaaaataagaacagctccctgaactcagactgaaaaaaagctgtgtatgaaaccactcttacttctcaggtgaccccaaatggaaatagctatgacaaattgtcctgtaatcaagccctaaagaatggactcttacctcttctggagggcctgatcacacacctttgtcagcaactgcagctgctgttgacatctaagaagaaacaaggaaagcggagggctgagggtattgtttgttttattttgattttgctcacttgatttggtcttggcacacaagaaagcttttaactatgaacatcatttatgctaatattttaaatgaatggatgtaatatatttgtactgattacaaccgtgtattactatagttattttactttacattgcactgcaggccttttatcaaatacagatatgtggtgtctgccaaggagtgactctttcttgccagagatggggcaataaacaaaatgagttgttagatctatttcaaaagccatatgtgctgtctgagtttgctgccatccactcaaggggaaggtttgtctctaaatgcttcaaaaggactcactcagcagctgacaaggcctgtgaccccaggggtctgataattcactgctgacatgttttgttttcacagttcagcaagactgtcagctgacccacaagtacaaagtgttttcgtcccctatgcatgttctagcaaggtcttcaaagtcctattggcagcttttcttgactaaacgccgccataacacacctggaccttcattctcttccattttttttttggctcatctatggaatgagcatgacacactctggctagaggaaccccttctagtgttttctttccatatcttttcctgcttctaagtggccataattaaaaccttccccattatagacatctgaaccacaagaatcccttcaactcccactttgtttgaggacattcttgtgtatgctatggaacagtttaatgattttgctttatgtactcattaatatccttttttataattattagattaaattagcagtcaagaagtggtaatatagtctcatataggttaactcttctgatatcttcttcctttagcagtttcacggatacctagtgaaacatacagttcatccccgtcaggtgcaggctcaacacttcatggtgagtacttggggaagatttagggacactgaagctagtggtcagctttatttggacacaggtgtaaaaacaagaactgataagaagccagcctcagatagatatataaaagtacatcttgatgatgaaaattacaatgaatggaaacaaaattcttctcagccattcaaagaagatagagaccaagccttagatttttatacattttatttccaaaaaaatctacacaatagcattttttactagttatatctatgaaaaataaatttcaatttttttattggaaaatagaataattagtcaacatggatttgtttagtctaatgttgcaaatgaatttttattaaccttatcaaacacatcggtgtggagagaaattagtattttgatcagctgaacctctcataccaagagaacaggaacagagcctcacttatccacgacccccaactctggcctttttctgtaccacttacatttctcatggagattctttagcagacatcattttgttgtttggaagtatggagcttcttttttttttttttcaaccaataggaaattttcctattttcaaccaacaggaatttttttttcaaccactaggaaattttattcctttggcaattgttagacaaatctcaggatcccagccttgctataaattggttcttaataaactttacacataatatttaagggatacttagacaatttaaattgagttctttcaaataacatatgaaacccaatcatggttttataccacttgatcaagttgagatgtcttgtccagatatcccctttatatccctagacaatgtctttaccagcacagccagagcattttcagaagtccccacaactgccaatggatctacgaaaactaatcacgtccatatcactggtaagtcatttatcctattttgggggattttatgctttattcactcaataaatatttatcaagtacctgccatttgccaggcattatgccagttgttggatatacagtgaacacactggctttttgaagattataatctattagtgatcgatcatgtgtatagtaaataaataatcacaactaaatttattttgacaagtactatgataaggtgttgtcagggtcaaacaggaagttctgattttaattggaggataggagaggactctgtgaggatatacttaaattaatatctgagaaaaataaataagaatttattcttgttgaataaattgaaaagtagcaaaaagcatttcaagcctatgaaaacatagtctgagaaagaaatcattggaacaaagagtactcctataattcaactaatataatattgtcatgcaaaatgtaatccctcttttatatcataagagagcaaaagattcaataaagttaggaccctcctaatgaaggtcatgattgtaagttcacaggcataatcaacttcaggggtgttcacttgactagtgaatgccacacctaggtactcagctcattttgtgtcaaaggtcatacagtcttctgatcattggagcatcatcttgcacacgtcgtggcaataaagctgcaaactgaggcactacaaagattttaatatattggtgccttaaagagctgtctagtttagagatgggtcaaaaatggagttctgtttttccacttccattgtgaaggcagtggtctcattttctacacttggttggaaaaaaaaatataggcattgatgtaagacctctttaaaatattttgtttggcaagaatgagggatcatggcagacaggaagcaggactagattgcaactctgcagcatgcagagtcttcattgtgaattttagctccagatcaactgcaagaacaaaccagcaatcctgagaaaacccacagaccctctgaaggaagcagacagcctctgtagcacccaggagacaccccaaatactctgggaggtggatagcctcacaaattttcaagcccatctcgccctccacctggagacagactcggggctgttggcggggtggggggcatggtgggagtgagaatggcctgtcagtttgtgtaggagttcggtgaggcctgtgactgccggctttcccccctctttcctgacaacctgcatgattcagcaaaggcagtcataattctcctaggtgcacaactccagtgacctgggaatctcacccccatccccaacagcagtggcagcaagacctgcccaagaagaatctgagctcagacatgcctagccctgccccgacctgatggtccttccctatccaacctggtagtgaaagacaaagggcatataatcttgggagttctaaggccccgcccaccaccagtccctctccagactactatagctgatgctttctggagagctctacctcctggcaggaggccaaccagcacaaaaacaaagcattaaaccaccaaaggtaaggaccctcacagagtccattgcaccctctgccacctccaccaaaacaggcactggtatccatggctgagagacccatagatggttcatatcacaggactctatgcagacaacctccagtaccagcctccagccaggcagactcactgggtggctagacccagaggagagacaacaatcactgccgttcggctcacaggaagccacatccataggaaaagggggagcgtctacatcaagggaacacccagtgggacaaaataatctcaacaacagccttcagccctagaccttccctctgacagaggctgcccaaatgagaaggaaccagaaaaccaaccctggtaatatgacaaaacaaggctcttcaacaccccccaaaacaatcatcctagttcaccagcaatggatccaaaccaagaagaaatccctgatttacctgagaaagaattcaggagattagttatttaagctaatcagagagggaccagagaaaggcgaagcccaatccaaagaaatccaaaaaaaatgacacaagaagtgaagggagaaatattcatggaaatagatagcttaaagaaaaaaaacaatcaaaagttcaggaaactttagacacacttttagaaatgtgaaatgctctcaaaagtctcagtgatagaattgaacaaatagaagaaagaaattcagagctcaaaagcaagatcttcaaattaactctgtccaacaaagacaaagaaaaaagaataagaaaatatgaacaaagcacccaaaagtctgggattatgttaaacaaccaaacttatgaataattggtgtaccagaggaagaaaagaattctaaaagcctggaaaacatatttgggggataatcaaggaaaacttccccagcctcgtgacagccctagatgtgcaaatacaagaagcacaaagaacacctgggaaattcattgcaaaaagatctttgccgaggcacattgtcattaggttatccaaagttaagacaaaggacagaatcttaagagctgtgagacagaagcaccaggtaacctatagaggaaaatctatcagattaacaacagatttctcagcagaaatcctacaagctagaagagactggggacctatcttgaacctcctcaaacaaaagaatttttagccaagaattttgtgtccaatgaagctaagcatcatatatgaaggaaagatacagttgttttcacacaaacaaatcctgggagaattttaccaaaccaccactacaggaactgctaaaaggagctctaaatcttgaaacaaatcctggaaacacatcaaaatgaacctgtttatgcataaatcacacaggacctatgaaacaaaaatacaagttaaaaagcaaaaacaaaaatccaaagtacacagataacaaagagcaagatgaaagcaatggtacctcatatttcaatactaatactgaatgtaaatggcctaaatgttccacttaatagatacagaacagcagaatggataagaacttacccatcaactatttgctgccttcgggagactcacctaacacataaggactcatataaacttaaagtaaaggggtggaaaaaggcatttcatgccaatggacaccaaaagcgagcaggggtagctattctcatatcagacaaaacaaactttaaagcaacagtggttaaaaaagacaaagaggacagtatataatggtaaaaggccttgtctaacaggaaaatatcacaattctaaacatacatccacctaatattggagctcccaaatttataaaacaattactaatagacctaagaaatgagatagacagcaacaaaataatagtgggggacttcaatactccactgacaacactagacaggtcatcaaaaccaaaaatcaacaaagaaacaatggatttaaactataccttgaaacaaatggacttaacagatatatacagaacatttcatccaacaactgccgaatacacactctattcaacagtgcatggaactttctccaagatagaccatatgataggccataaaatgagcttcaataaatttaagaaaactgaaattatatcaagcactctctcagaccacagtgaaataaaactggaaatcaactccagaaggaaccttcaaaaccacgcaaatacacgaaaattaaataacctgctcctgaatgagcattgggtcaaaaatgaaatcaagatggaaatttaaaaattcttcgaactgaatgacagtaatgacacaacctatcgaacctctgggatacagcaaaggtggtgctaagaggaaagttcacagccctaaacacctacaacaaaaatctgaaagagtgcaaacagacaatctaaggtcacacctcaaggaactagagaaacaagaacaaactgaaccgaaatccatcagtagaaaggaaatagccaagatcagagcacaatacaattgaaacaacaacaacaaaaatgcaaaagataaatgaaacaaaaactagttctttgaaaaggtaaataaaattgaaagaccattagtgagattaaccaagaaaagaagagagaaaatccaaataacctaattaagaaatgaaatgggagatattacaactgacaccacagaaatacagaagatcattcaaggctattgtgaacccctttatgcacataaactagaaaacctagaagagatggataaatttctggaaaaatacaacccacccagcttaaatcaggaaaaattagataccctaaacagaccaataagaagcagcgagattgaaatggcaatttaaaaattaccaacaagggctgagcgcagtggctcagtggctcatgcctgtaatcccagcactttgggaggctgaagccagtggatcatgaggtcaagagttcacgacccgcctggccaagacagtgaaaacccgtctctactaaaaatacaaaaatcagccaggtatggtggcaggcgcctataatcccagctacttgggaggctgaggtgggagatttgcttgagtctgggtggcagaggttgcagtgagcagagattgtgccattgcactccagcctgggtgacaaactgagactccgcctaaaaaaaaaataaataaataaaagaaaaattaccgacaaaacaaagtccaggcccagatggattaacagcagaattctaccagacattcaaaaaagaattggtaccaatcctattgacactatccacaagatagagaaagaaggaatcctccctaattcattctgtgaagccagcatcaccctaacaccaaaaccaggaaaggacataaccaaaaaagaaaactacagacctatatccttgctgaacatagatgccaaaatccttaaaaaaaaaaaaaaaaaaaactagctaaccaaattcaacaacatatcaaaaggataatccaccttgatcaagtgagtttcataccagggatgcagggatggtttaacatacacaagccgataaatgtgatacaccacataaacagaattaaaaacaaaaatcacatgatcatctcaattgatacaaaaaaaaattcaacaaaatccaacatccctttatgattaaaactcagcaaaattggcacacaagggacataccttaatgtaataaaaaccatctatgacaaacccacagccaacacaatactgaatggggaaaagatgaaagcattccctcttagaactagggcaaaacaagaatgcccactctcaccactcctcttcaatgtagtactggaagtcctagccaaagcaatcagacaagagaaagaaataaagggcatctaaatcagtaaagaggaagtcaaactgtcactgtttgctgatgatgactgtttaccttgaaaaccctaaggactcctctagaaagctcctagaactgataaaagaattcagcaaagtttccgaatacaagattaatgtacacaaatcagtagctcatctatacaccaacagcaaccaagcagagaatcaaatcaagaactcaaccccttttacaatagctgcaaaaaaaaaaaaaaaaatgaaatacttaggaatatcctaacaaaggagtctaaattcctctaaaagaaaaactacaaaacactgctgagataaatcatagatgacacaaacaaatggaaacacatcccatgctcatggatgggtataatcaatattgtgaaaattaccatactgccaaaagcaatttagaaattcaatgcaatacccatcagaataccaccatcattctttgcagaattagaaaaaacaatcctaaaattcatatggaaccaaaaaagagcccacataaccaaagcaagactaagcaaaaagaacaaatctggaggcatcacatacctgatttccaactatactataaagccatagtcatcaaaacagcatgctactggtataaaatacgcacatagaccaatggaacagaataagcccaaatacttacagccaactgatcttcaacaaagcaaacaaaaacataaagtggggaaaggacacccttttcaataaatggtgctgggataattgtctagccacatgtaggagaattaaactggatcctcatcttatacaaaaatcaactcaagatggattaaggatttaaacctaagacctgaaactaaaaattctaaaagataacattggaaaaattcttctagacatgagctcaggcaaggatttcatgaccaagaacccaaaaagaaatgcaataaaaacaaagataaatagcaagcacccaaaagcaaatgcaataaaaacaaagataaaaagcaaatgcaataaaaacaaagataattaaactaaagagcttttccacagcaaaaggaacagtcagcagagtaaacagatgacccagagagtgagagaaaaccttcacaatctatacttctgacaaagaactactatccagaatctacaactaactcaaacaaattagtaagaaaaaaacaaacaaccctatcaaaaagtgggctaaggacatgaatagacaattctcaaaagaagatatacaaatggctaacaaacatatgaaaaaatgctcaacatcactaataatcagggaaatgcaaatcaaaatgacaatgcgataccaccttagtcctgtaagaatggccataatcaaaaaaaatggtagatgttggcatggatgtggtgaacagagaacgcttctaccctgctagtgggaatgtaaactagtacagccactatagaaaacagtgtgaagattccttaaagaactaaaagtagagccatcatttgatccagcaatcccactactggatatctgcccagaggaaaagaagtcattattcgaaaaagatacttgcacatgtatgtttatagcagcacaattcacaattacaaaatcgtggaaccaacccaaatgcccatcaatcaatgagtggataaagaaaccgtggtgtatatatatatatatgcactatggaatactacatagccataaaaaggaatgaattaacacatttgcagtgacctggatgagattggagactattattctaagtgacgtaactcaggaatgaaaaaccaaacatcatatgttctcactgatatgtgggaagctaagctatgaggacgcaaagacataagaatgacacaatggactttggggacttggagggaagaatgagagggggcgaggggtaaaagactacaaatatgatgcactgtatactgcttgggtgttggctgcaccataatctcacaaatcaccactaaagaacttactcatataatcaaacactacctgtaccccaataacttatggaaaaaaaaaataaaataaaaccttttgttctttcctttatctaaaactttggacgtaaaatattatatcccaccatattaccatggtagagcttagtaaattttgacttgtgtgaaacagaactttgtctagtcctgagttgaccaattgtctctttcatgatcatgctactctagtggtttgaactatgtaaactttctagtcatctgtatatacaatgtgtcacataattatgtattattggactacatgggtctccagggaaccctcagtttctactttgacaggggtgagaatcaggaagacctcgaatccctggatgtatgttgtatgaaagggaactgtcttcaacacttctaaccaatgctaacatgataacatcacatggtttcagtccaggctatgtaaaaacacagaaaagatgtgataactaatattacatctagttctttgacctgtattttttgagattttgctatatgaaaagcagtgtaataaaaacggggcaatgaaataaatttaaatccttgtcttcactcacaagcagttactacctagccgagacaaggaaagaaaaccaatccagatagctttttgcccaaatgatccatgtaatcgaaatacctaaagacctatctatcatgtataagaaatttcactggagtatcattagcaataacaaagtctggaaacaatttaaccatctaacatcgtgagataaattaaataaactggtatatccattgaactatccagtcatctaatagaatgaggtaaatctctgtgtggtgatatggaaagtattccaagaatgttttttaagaaaaagaggccaggtgtatgtcttttggcctcttattcttaaaaaaacatgtaaaatgtaaaatgttaaaaatgtaaaatgatttttaccttcttaggatactttaaaagctcaaaatcactaatcactagagaaatgcaaattaaaaccacgataagataccatctcacataagttagaatggctattactgaaaagtaaaaaaaaaaaaagaagaagaaactgatgcaggtgaggatgtggagaaaagggaatgcttatacactgccggtgggaatgtaaattagttcagccattgtggaaagcagtttggctattgctcaaagaacttaaaaaaaaaattactatttgatccagcaatctcattatattggatatatacccaaaggaatataaattgttctaccataaagacacatggacacgtatgtttatcacagcactattcacaaaagcaaagacatggaactaacctaaacacccatccacagtgactggataaagaaaacgtggtacatatacaccatggaatactatgaaaccataaaaaggaatgagataatattctttgcagcagcatggatggaactggagaccattatcctaagcaaactcacacaggaatagaaaaccatctacagcatgttctcactattaagtgggaactaaacatcgagtacatatggacacaaagacaagaacaacaaacactgaggcctactgaaggttgagaggagggtaaagattaaaaaaaaaaaaaaaaaaaaaccctacctgtcaggcactgttgattacctgggtgacaaaataatctgtacaccaaaatccccacagcacataatttacctatataacaaatttgcacatgtacccctgaacctaaaatagtgaaaaaaaagaaaaagaaatcatggacagaatagtgtgtataatatgcccccaactgtaataaaaagggtatatattcatggtacatatgtatgcttatatatatccacagaaaatttctggtagggtacgtaattaactcttaaaagttatcacctcatgtaggtaacaaggcttagacatgcccacctccagagtatgatcacagccaatgttgaagaaaatatgtttcacgtaggaaaaatggtttaatcctgttttccaaatgccaaagtttgggattaaagttcatctttctttatgcccttttcaggtattgtggtcaataagcccaaagatggaatgtcctggccagtgattgtagcagctttactcttttgctgcatgatattgtttggtcttggagtgagaaaatggtgtcagtaccaaaaagaaatgtgagtataatactaacatatgtaggaacagattaatttttcattataaaatattcatcagtacaatatattattactctatgaagttcctcccatattttaatggggaaataatgctcacagaagctcagagagattatatagctttcccagcattacatagttgggattaaatacacaactcctgactcagtatccctctctgcattggcctagtcaggctgtaacattcgtcagatagagcaagtccgtggacatgaaatgagaactgagcctcacctctcctcaaaactaaaactgatttttcttttaatcttcattattttttcattttcatgcatctttgaactgcctaggctccactggtcatagatgctcaagtgtgaaattgagtgagaaaggtaattttaagagatttccagctgctttttttaccagagtgggcttttactgcccttttctttttttcccaagcagaaaagaaagtaagcattgggttaccccatttttgtcttattgaaatattttccaaaagccttctccaatcggcagtctgaaatggtacataaggttaagcctcatttttctgacttgctattttgagtcagtctgggttgggccataactggaagggaccccagtacccagaactgatcttccacttgtcttactactactctaagataacattaaccattgtgccatatactttcctaccttttgcagagtatccttgaagactctgtaaccacatacagggagtggtgaacaaaacactaaaccagtagttagaaattctggattattttccaaggactacaatttggccaccacatgaccttgagaaactcataattccccaaaaaacaaaagtaaaacaaaagtgcatgtttcgtagaattacctattaatacatatgaagtctccattaaagcatctaaaaattgggtaatagggattagagagctttatattaaatgaacaaatgaaatctgaaaatctgaactgattttttaaattgttctgtattcaaatgtttgttttatatggagatgagaatcaatctctctatcctccttcccccactacccactctttatctctcctaagatgctatggattgccagggcatagaggtgtttgagtgatgaacataaagatgttcacagatatatttctgttgcctgatatcaagatagctagagcatttgtatagctaaattccatactaacttggctctttaatgcatttcggaaaaagagattacttgtactaacataaaatagttctttgtacaaagatgactttaagaatgttcactgattcaaacaaaagggatttaggcattatctagccagtactcggggattgagaagagctttacttcccatctctaccctatccccgcagtacatagtgagtgtttgggcaaaggctggggctagggttagcaaagaggctgtatgaaaagcttcagtcttaaatcctaggattttaagatttagtctctggaggaatattttaatccacataaaagaaacatttcttctattaggaggcagttgtcatggagagtatcagttctggtgaaaagacttgaattgttggtctggttctcttgagcaagttgtttaaaacctctgagcctcagttttatctgtagaatggtgatgcatttcctgcacacaaagtaaataatgttatgatacatttcctgcacacaaagtaaataatgttatgataaaaatgctcagttttatctgtagatggtgaggcaatttctacatacaaagtaaataatgttatgataaaaattctttgcaaactacaaaataccgtatagatcatgaggttcaaatgtgactaacaggcacagggttatgccagcaaaaatgctgaaagaactgggagagtatgtctctttctcatcaatctgtgttctcctttaaagaaacaacacatgtctgtgtgtgtgtgtgcataagactccctcaattcttagcattgaaagaccaatattttgttcctagaatggaaagacctccacctttcaagccaccaccacctcccatcaagtacacttgcattcaagagcccaacgaaagtgatctgccttatcatgagatggagaccctctagtctcgtgagactttgccccatggcagaactctgctggaatcctattgagaaggtagacattgtgctttattaatatagtcgctcttcagccatgcctttgctgcagctgaaatggaagtcagaagtgagtgacctgttttcccagcaactcaccctcttccatctccaaacgcctgaagcttaaccaagagtgagaggatatgtcatgttcacactcaatgcaattcgtagtggttttcttgcttatgtaagaagtacatattagtctgccatctttaaaaaaaaatacagtattttcatttaaattctctgatggagggacaacaatggtttcaactgtatgcccatgcctgatcctcttatttgaacatctatcaacattgtaaactctttgccaaaatcctggggctttgctgcattccctaagataattacaggaaaaagaaaatgtaaaagtgctaacaaggctgccaagtaatggagaagtatggttagtcttcatattgaaattctgttgcttattttcatggaaggaaacagaatactttgcacaggaaccacattttcaatcctccttcactgtcttcctaccatgttcagcccagactcctgccacatggaccaggatgaagagggatcaaagagataattagccaaaaacccagtagcctagaagatacaaaactccactggcctctaaaattatattagccaagagtggtttcatttgagtgccttcgtgtgtatgtccatcaaactggaaccaaactgttttgtaagtaaacaggcagcctaagcccaaccctactttctaattccagttattctctttttcatctggggatttacctgttcatttaatctgcctgttttgatctgttttgaaaaagataaagagcctcaaatcagaccagcactgattaattaaccctgctcctaccaatcttttttaaagcagttgaagcagaatgtataggtgtcagagaagaaacctagtcagccagacgtgctctgtattcagcaatagtttgtgaatgaataaattactaatcctccttgtcgcttgaaaccttcccacactccctgctccaggagggaaaaacagatgttgttgacagatagagtgataggcaaattctgtgtggactttagtcccaaaaggaaactttagttcacttgcagtatgcttatccttgactgcacatgagaatgccttgtgcagagttatttggagattatgtctttttcttaaacaccatggctgtcacacttcagttcaattaaatcagaatgtctgaggagtgagacacaggcatcaacactctcaaatgattcacatgttcagccaaagttgagaaccatcgagcctgtggaagttctttctcatggctcagaatcttaggtaggtgcttaactcttgtggtggccagcctccaagatgagccccagtgttcttgcctcctactattcacatctttatgtggtcccctccaatgctgaatacagatgatttgtgtaacctgaggccaggattaaggggaggcaatcaatgcacctagggaaaaaatttaaggaggtattcacactcagggtcatgcacttgcacaatgttgagaatgagtaccactctcaccattggtatagccaaaaaagcttggaagtgaccaaggctaggtcacaaaatacactgtggcttcttctttgatctctctttgaccatactgacactgggaaaagcccattcccatgccatgaagacaccaaggcagccctattgagaaatctacctgtcgtggccgggcgcagtggctcacgcctgtaatcccagcactttgggaggccgaggtgggtggatcacgaggtcaggagatcgagaccatcctggctaacacagtgaaaccccgtctctactaaaaatacaaaaaattagccgggtgtggtgtcgggcacctgtagtcccagctactcaggaggctgaggcaggagaagggtgggaacccgggaggcagagcttgcagtgagccgagattgtgccactgcacactccaatctgggtgaaagaccgagactccgcctcaaaaaaaaaaaaaaaagaaagaaagaaagaaagaaagaaatctacctgtcaaggaactaaggtattttgctaacaagcaccaacttgccagccatgtaagggagccatcttggaagcagatcctccagcctccagtcaagtcttcagataattgcaacttcagttgatcttttgaccaagacctcaagagagccagaactacccagctaagccttttactaaatttctgaacttctaacactattagataataagtgcttattgtttaacaccattaattttgagtataatttgttacatagcgacagataactatacagctcaacaactagaaaaataaactgtttacctgccttaattatttatctttagttccttattagttctcaagaaacaaatgctagcttcatatgtatggctgttgctttgcttcatgtgtatggctatttgtatttaacaagacttaatcatcagta

SEQ ID NO: 21 - DNA, 34213 bp, Homo sapiens
gatacacatgaggtcacagatctactgcctctccccctttaaaagaaactactcagctccatttgtctcagaatctagaggaagttgacaaaggtgccacagcagcacagcacagtatgtggtggagagttctcagcttgctggcatggttccccttgcaaggtaaggacttagagttatttttgttgttgctcagctgacttaatgttttgccacatctacctatcagtcagtcaactgcatttacagaggagctgctgtagaagacaacccaggtaactgctaatactttccaagccatgctcaaatcatgcatctgagggatgttactgcgtttatttgatctctcgttcaatggctaaggagtatagaaaggatcattatagtgtgtgtctctgtgggtcctatgttacggcaagatgaaacaagcttattaggctctgtcttttaagggcataccagttgaaagagcatccgtattgaattttattttattttatttatttatttatttatgagacacagtctcgctctgtcgcccaggctggagtgcagcggcacgacctcggctcactgcaagctccgcctcccgggttcacgcctttctcctgcctcagcctcccaagtagctgggactacaggtgcccgccaccaccacgcccggctaatttttttatatttttagtagagacggggtttcaccgtgttagccaggatggtctcaatctcctgacctcgtgatctgcccacctcagcctcccaaagtgctgggattacaggcgtaagccaccgcgcccggcctccacgttgaattttaaaatttccttgctgtataaatcttagccaaacgatttaatctctttgaaactcagtttctgcatcttaaaatgaaaatgataaaaacttttgatccaccaaactccctggattgttagaaggatcaaatttcaaatgtgaaagcactttgaaaatgataaagcgctgtgcaacacttatttagctcagaggtaataatgagaccaatgaaaacttcgtgtttatttttaaagagtaagttatactttacattttactataattttcaaatttggattttagtgcttaatcctaatgtagcattatgaaaattaaggatagaagcagttacctttttggagcaggtcaaattattttctacccaaaagtgggggcaggggtgtaggaagtggctcctgttgtccctcagtctctgcttacaattgtatcagattcatgcaaaggacatccctcacaaatccactcaaaaattttgctttttgtgtgtttgttaccaaatattgaaactgtagttctgtttcatgaaatgcacctatccttctaaatctacatttaatctggaatggcatctgaaggacgctactttaaaaaactcgatttcctattttacatagtacttcaattccctattttatatacttcaattaatgccttctttttttggtccctgtaccctgaggcacttaataaggattcaattttggtaatgaataatattagtttcttcattaagtggcttaaagaatagctaatacattcaaaaagagtacatttagacagctaaaattaggatgatttcaatttttccagagtttaaagcctttcactgaccttaactttttcaggctttgagttattgcctcataaaaaataactcataaaaatacattttttaaataaatagcaaaaattatgtttcaaggtaaacctaaattacttaaatattatttatatagagaggaaaaatattgtttcatgcacagtgctgagtactttgtgttaattacacttaatcatagcggaagtactgaggtaggtactaatatccccaatttaaagatgagaaaagaagttatgtaacctgcccaagttttaaagctagaatatgacaacataaataccagcctataaagcacatagtaaaagtatttatttcatgaaacttctaattaacgtgtgtgtgtgtgtgtgtgtactagttgtgacagaaaatgtattaatgtggatcaaaagttggaaaaccactgactttcacaatttggaggattcaatattaaaaagtcctatttgaaaactcgttcaaggggccacccgagggcatctaagctcaatggcatttgagcagtggctgccacccctgacctaaccttgctcaagcccatcccagacgtaattaggaggaggtgaccatgttgctttcttgtcagcaaaaaaggcagcaaatcatcagttttggcaaagctataaactgtcagctgattttagcaaattaaattatgggaagatcactgtgactacttctacagtgttacttctatggctgccaaaaatttatggaaaaaaaaaaagtcacgtaatctcagagcctgccctcttttcaaggccactcccagaataaatagtcttaggactggtaaaaacacaataaaaatgaagcatttttcaaaattcatcccattaaattacactgtagacaatgaaaatgtcaaatccaatgaattttgaaccctctgttttcattgttttgtggagggtaggatgcagaaaacaaaggaaaattgcaaattgagtagttcttttcatactttctttgcccaggaaaaagtcacatgttagatgacatgttgagacagcttctttaaaatgtactaaaaatattccgattctgacaagtctgatttatttttatacctgcaattttctctattgattcaatctaaaaataataaaaatctttttttgtaatgatctgaattaaaacacacttttgcttaatgcctcatgacagtcatgtaactagggctctgatttgagaattaatgcattgcatgtctctggctttaacttagccctagtctttattatttgatataacagttaaagagcaaagttagcatcctattataatatttattcctaaatatatacttttactctattttttttttttttgagacagagtcttgctccgtcgcccaggctggagtgcagtggtgtgatctcagctcactgcaagctccacctcccgggttgacgccattctcctgcctcagcctcccgagtagctgggactacaggcacccgccaccactcctggctaattttttgtatttttagtagagacaggctttcaccatgttagccaggatagtctcgatctcctgatctcatgatccgcctgcctcagccttccaaagtgctgggattacaggtgtgagccaccgagcccggcctatttactcatttttatccactaattcaaccaatatctaaaattttacattatgctaaaatgagtggatggcaaacagcttttccataaggagtttgtaatctatctacagagaaacacctgtaaccaaataattataaagtaatgtgctaagtgctgtaatagaagtatatctcaagactttgggaaactaggggaaagacattatggggaaaagggaagctaaggcctgttttggaagttttgacaaaagttgtgtaatttgagttgagcctataagttgagtcttgagttgggtcttaatgttgagtcttgaaggagatgagaaagacattccaggacaagagaatatcatagaaaaagacaaactatcttctggagcctggaactttctggaaacagcaagtggacatgtacaaggactatctgaaaaggagtatcacgacatggcaaaggaggagaacacaggagtcaagtcggctggaatttgggcctgattcctataggcaatggaagccatagcaaacacttgaatgaaggaagagacataatcaaattcatgggttatatgtttgtttgtttgtttgtttgtttgttgagatggaatttcattcttgttgccctggctggagtgcaatggcacaatctcactcaccacaacctccacctcccaggttcaagtgattctcctgcctcagcctccagagtagctgggattacaggtgcctgccaccatccctggctaattttttgtatttttagtagacatggggtttcactatgtcggccaggctggtctcgaactcctgacctcaggagatccacccgcctcggcctcccaaagtgctgggattacaggcgttgagccaccacgcccggcctcaaattcatggttttaaaatgtaatcctagaaccagatgatgatgatgaattagagagaagagagactagaactaagttattacagtggtccaggaaagaaatgatggagtccttaactaaggcagcaataatagtgacaaaagaggactaaattgattaaaggatgttttggagaaagaagagtttagagcacctctcaaatatctggtgtgcagtggttggtgatgacattaatttatataagggaactctagaatggggcaggtggcatatctgtgttagacatgggtggagcatggggacagtagagataacgagttccaatgggacatgtagagtttggggtctttgcaggacaggcttgctctgctctggttttaaatttattgcatgtaaaaactaggctattaaggcaagaaaaggaaagaatattttattcttttctcagtctacatgatagtctatagtagaggtaaagattgcacatgagaacttccaaaatcttgggaaagaccaaaaaatcttacgaactgcactggttttgtctatgtgtactttggtagatggctgttactgctgcttgtccttttgtttgggagtagatcacatgtgctttggtgtaaagccatccactgataggacaattagttcatgggatttgggatggtgatgacggtgaaggtcacaggttccatttccatatataaagcagtcacaatctatagccccaggatcagctagcaatctcataacatatggtcatgcatggatggatgaattcagtcacggagataatgacaaagcccagaagtcaataatccattctgtaaacatcacctaccgtaggaagtggtgacctcacaggcgaaacaccacagtcattcattgtcaaggtctgtatgttcagcatgtggggagccgtgcagggctaatttgcagataagaactctgaagctcagataggactaggaagtaggtgtatggcactcggggtctaataagaaagcttaaaggtaaatggggatgtacatgtctctagagcctacagaggaggaagtggtaagcaaagaagatatctcacaccccatccctctgacaacaaaggtgaaagtctgactccaaacttaggtgaaagaaaagtcaaaagaagttctaatttggtttccagtggcaatgagaagaccctggggaacttgtccttggaaaatgtgccaccaaaacttaggcacagcatcctgctcttccacctttaacaaaactacagacattgaaacatatttttaagcactacagtctaagcaaagctgggtgggtctgtggcttctcactggggctattcttcccttctacagtgatttcctgtttctaaatcgaacatggggtctacatgataacactgcaagataagcagacccgtaaagccaaaagcaaggcttgttgcaaagagtaaaggaaacaacgaatattctatgcctcaaacacagccctttccatatgaaactcaggcctctacagtgtggtcaatctggttagccgcctgataccgaattctcagcaagtgcaaacattaatcttaagacatacagtactttagtgtataataaaaagccaaactatatttcatcacaatttttaaaatgttgtaagggttaaattatactatttaattcataagcatgcatcctaagaaagagaaaaatgatacatacaaccttaaaatgggagacatttattcctaaacaagctgcagataaatctcaccactcccatcttacccaatgcaggctttctgtttagaccatcattttaccaaaggtaagaacgttggcaaaacttctgtcaatgtctagtcctcaaggatgaaattagggcatgtttcttaatactactctttattctatcattgattccatgtgtaactttcttccagtagcttccttcctgtttctcagtatttttattaacaacaggagaacaaaggtatctgtcaatcacctacattatagtgccatcgtgaatactagcattaagccagtacttttcaagctcacattgtaatagtttctgtaaggaatgaattttagagaaatataaaacatagccgttgtcctctagaaacttcagtctgtttataggcatcaagacagtacacaagaactagtgagtaaaacagtaagcatcacaatgctatggaagttagacagttctggattcaaatcttggctcaaaagctgcttaacctctgagctttgatgccctcatctgtgaaatgggaataacaacaccttctttacagagttattggttttgggcctgaataactaggctatttgctgttggtgaaatctaaaataacacatttgggggaagagaatcaagagtttgtgttgtacttgttaggctttcagacttctaactgatcatcagaaaggtgatgaggccagatgagatgacctatggagtgagtatagagagtctatccaggatctgacctccgttgtgtgaagggcagattgatgagaagaacccggaaatagagctgaggagcagcagctgccagtgagttaggaagggagtcaaaaagagactgacatctagggaaccaggtaaagacactgatttaaggggcagagagtgatcatatatggcgaaggaacaccataggttgaataagatatggtctgagaatggagcattggtttgagcaatgtgaaggtctttggcaaccttggcaaagagagatttcaacgaggtagtggagttgaaaacctggtcagaaaacaaagagtgggataaacaaatatagatagttctttagaaaaatgtgtcagtgaaagagagggaaggcagggcacggtggctcatgcctgtaatcccagcactttgggaggcagaggtgggtggatcactttaggtcaggagttcaagaccaggacaacatggtaaaactccgtctctgtactaaaaatacaaaaattagtcagatgtgctggtgggtgcctgtaatctcaggtactcgggaggctgaggtaggagaattgcttgcaactgggaggtggaggttgcagtgagctgagatcatgccactgcactgcagcctgggtgacagaatgagaatctgtctcaaaaaaataaataaataaaaaggagggacatagggtagaatagggtagtataggatagtagctggaaggaaatctgacatcattttgtttatgcattttaatatgggatgaatagtatatatttgtgtgctgatgagaatgacagttttttttcttaattttttgtaaagacaaagtcttattatgtttcccaggctggtctcaaactcctggcctcaagtgatcctcccaccttggcctcccaaggtgctaggattacaggtgtgagccaccacatccagccagagaatgatacagctaaagagaaaaaaaacaatgatggtagaattatttttgtaccaaatcatcttttgagagatggagcaacacagaagggaattccttgtgtaaataaatgagatggaaactagtgtccaagtggagataccgggtacccactccattcacagcaatgtagggcacgccaagtatgcaggatctaaaagcaagtagatgtgacttggggatgacattgagaaacacatatgcaaataagttagcatttcaatagcaaacaatttatgtgatgaagagaagagagaagtgggaaaacatattattatttaatttaatttatttttgagatggagtcttgctctattgcccaggctggagtgcaacagcatgaactcagctcactgcaacctcctcctcccgggttcaatgattctcctgccccagcctcctgagtagctgggattacaggtgcccaccaccacgccaggctaattttgttcgagaccatgttggtcaggctggtctcgaactcctgacctcaggtgatctgctcacttcggcctcccaaagtactggaatacaggagtgagccactgcacatagccataaattttattatttcacagagttctaacacctctgtctgtctgtctgtctgtctctctctgtcttttcatcaaataatgattgtgtaccatgaactgagtggtatgattaactacacctttggttggaatctaaggtccaaaatgaaaagaactcattatcaccatttgctcctcaaaacctttaatccttctgaactgttccaatttagatttactgcgactggaactgcttcttccttaatgtctactaggacctaactgcttcttccttaatgtctactaggaccttagaatgtttaataataaatagtcctgtaacactggggaaggagatccctagtgaagagctgcagagctacaaggctttgtcttttgacactgactctttccacttttctttgtaaagcaagagtcagttcagcttttcaaataattattaagcactatataccaagtaaaagaagaatgtcatgcttactatggactaagtactacactaggttctttacatatattttttaattgcctcaatgactctatgagatgaatactattgtttttcctgtttttatggtaaggaaattcacacacttaaattgcctaagttcgtgctgttagtagtggaggagccaggattccaacccagtcaatttggctcgtgtgcgtgtgtgttaccattgcatcatatgccacccaggttagggacacagagatgattataaacagctcctcggtgcaacaggttcagatggtacaaagcctaggggtctattgacagataagacaatcaagagccagaatgttctcagaaagcttgaaccctcactccaaacttaccagataagactgatgtagggagaatatgaaatctgaactttggttccaaaatgaaatgcatcatgaacacaggatagggagacgtgatgtgacacaaattctctgaagaagatctgggtgttttgggtgactgcctcaacaggagcctagtgagatgttacagctcaagagtgaaaccctgggcttaatagaacaaggaagtccagagggtgggtggtgatgcaagtgaatgtccccctatgctcttgccagctctgatgacacataagtcccctgtcccatgcaaaggggcatatttttggaggaacatggacaaactacagtatattcacatgtggctgttggcaagtggtgaacaaatgataatgaaactagaggcatagcttctttaattatttgaccttatgctatggaaaagacttttatcttcagaagacccagtctgactaagggcataagggcttggacgcagtggtatggtagaatgtcttctggaagtctttgaaagtgagattgatactcatcttcctgttccatgtggtttctgcagcagcagagagttggtcccaagtatctgaggagcagccacagggctctggaattttattcattacactgcaactgtgggctttgggaataggatgctctgaacactcaggcctggggtcagaagaactgatgcgtgggccccaccacgaattccgagttaattagtagtgaatgaggccaggacacaaactccctgagtgagtctaacatactgccaaggtggaggaccactggctttcctaccttcttaatatggatgtcatgagaacacaaaatagggactcaatggcttcttaaatctttattatcagcaaaaatcccttagaagaaattctattgtcattctctattaatatcatccttattactcaattatggattgatgtcacagaggagaatatttccaaatggccaaacctaagcagaattctggccttatgccccagtgctttttttggaaagcacagatctctttttattacctccttgttgttcattatggtattggtggatgatatgggtgtttttccattagaactccagcaaacagtttcccgtgaaagcttatatgaatccaatacaataattctgggttatttctgctagaggctagattcaaattaatgacctaggaatggaacaaacaaaaaagtagacaccaattaattcccagagctctccaaagcacttttcctaatacttgaaatttatcacaagaaaatatattctcctggtttcttttttgttgttgttgttaaggtttaagatgatgccgtaaaacttgttacatttgctattcataatttataaccccatggtattcttctgtttataaaagtggtttataccttcattgataagaattgccttttcctcaggacaaataatttaatttataatatgaaggaataatgaatggcaataagcatgccaaatcatcaggaatgccagtttatttttcatcaatttctttttttggggagataaatgtgcagctacttagaacaaattgttcatcattctctgggggttgtgattcggagaaattagacttgtgtttgtctggagaaagctcggctgtggaatactgaattgaatgaaatcttagaacatcctccctctggtgtagaaactctcggacaggtggggctcagccacttgccctgaagggtaactccgcagttcaccagagcaccacgattataacattctttcttagaattctagacacacaacttgaaggtactagatgctcttttataagctgaggccagaaaggttgcattttctggggccttgtggcttagataggctgatgtagttacataaacacggcctttgccatccacagccctgggtacagatcccagctcaatgacctctgttaccttgagcctctattccctcgtctgtaaagtgagcacaattcttcctttctagggttagtttgaaaattaaattcgggttgggtgctgtggctcacacctgtaatcccagcattttgggaggccgaggtgggcagatgacttgaggtcaggagttcgagaccagcctggccaacatagtaaaaccacgtctctactaaaaacacaaaaactagccaggcttggtggtacgtgtctgtaatcccagctatttgggaggctgaggcatgagaatcgcttgaacccaggaggcggaggatgtagtgagctgagattgtgccactggacttcagcctgggcaaccagagtgagactttgtctcaaaaaaaaaaaattaaattcaatacaggtaaatggcctggtacagttcctggcatatggcagagcaatcgcccaaaacctgttgaactgtagtttgaccttccctgtcttctgtcaaaatcctaccccttccttcagacctgattccagggtccccttcttcaagagatatcattactgctcctactctcagttcttgcctctcccctcccattttgtttgtatttgcttattttttggtttctagaagaaatagataatacatgattgaatgaatgaacgagacaaaatccctgagacactgtggacccccggcctgatcatccccatttctcttcctccacagaggcctctctgactaaccacacagaaaccatcaccgtggaggaaggccagacgctcactctaaagtgtgtcacttctctgaggaagaactcctccctccagtggctgaccccctcagggttcaccatttttttaaatgagtatcctggtaagtgaaagaaagaaagaaaaaatgccaccagaccttaacctgagggtttttccagccggacagtttggtgggacagaaagcctgcatgagtcacccaaggggtgggctcagcccacctactgttacacatgaatcacgcctccaaatcctgttattttacacgcagtggcttgctgggggcaggaactgtgaaatggaaaccccaccagaatggttgttaaagggggttcagattacaaagcacatttccatgtccccaccccacactcacaccactttttcactctcagtaactatcacacaaccacagcacaatgacagacaggcaaccaactgactgggagcccgatcctcatgcaaccaccaccaccccagataagaagccagctgcttcgttttccatctgagcaatccaaaggcacattacaaagctcctttccagatagctcttcttctcctgttggtcttaacataaaatcaagatttttaagcaatagaaatagacaggatgtattaatttggaaatgaggacagtcatttctcttttcacaaacacacatgaagaaagtacaagatgtctgagatggaaaaagactcttaagaatctcttgggttcatctctttgacgttaggcagggttttactaaaccctagatcattttatgtctccatttaatattgctaactgccaaatacttggaaaagtctaaaacacatttcagtcttatttataaagcagagcctcttaaagcatatcatgctggctgggcgtggtggctcatgcctgtaatcccagcactttgggagactgaggctggccgatcattttgaagtcaggagttcaagaccagcctggccaatattatgaaaccctgtgtctactaaaaatacaaaaaaattagctgggcgtggtggagcactcctgtaatcccagctattgggggaggctgaggcaggagaatcacttgaatctgggagatgacagttgcagtgagctgagatagtgccactgcactccagcctgggcaacagagcaagactctgtctctaaaaaaaaaaaaaaaaagttatgctttgaaagcattattagatactgatatgttaacataaagaaatatattatttcaagctaaatcaactagaagtaaatactaattgttaaaagttctgagagaaaaaaattttaaatagagataattctgttacataatgctttttgttgttttgtttctggttttggtacactgggagaagagggactctctcggatttctgcagcagaatggcttgatctagctcagtggttccccacccggaatgatcttaccttcccgtggagataggacaatgtctggagatagttttgattgtgccaaatgtagaaagcggggcagtgcttctggcatctactgggtagaggccaacgattcatcggatatctttcctcataacagctctatttccctcttgtacagctttaaaaaattccaaataccagcttcttcatcactcggccaatcagctctccatcactgtgcctaacgtaaccctgcaagatgaaggcgtgtacaagtgcttacattacagcgactctgtaagcacaaaggaagtgaaagtgattgtgctgggtaggtacctgcaagtgaacccagtaggggagcaatatggataggaacacgatatgtcgtttttaaactgaaccttttagtttaaaaatgttgcctagagcaaggaattgcctgggacacctctgccatcttttattgaaaggaaacagaagagagcattttgagaagcaagaccaagattgaactgtgaacttgtgaaatttgtctttgacagcaactaaattttctctccagggaactaaaagaaaagaaaaattgatatttgatgagctgcgactatgcgccaggcaccatgtgaggttctcgggaatcagagatgaattaggcacaatctctgcccataaggagtttgcgcaccagctcaggaagaaaaacatgtatgcaaatgaagtggaacctcatgacagcaaatcctaagatagaatgaattcagatgtagctgcactgcttgatctgctcaaatcctctctgccaaacaattcctcttttctgtaggagggcgggattgggaggtgcggataggaagtgacagcctcctaattacctgggacttactcagttctacagatggtcaactgtgtccagtatgtctatccttacttgttttgttttttgtggcagaacagatcgattaaaaacattgctttttattgatctctaagtaacatcatctcacatatcacacaaatgaatgtcttagacttctcctgttgaattactgcagtgtggtgcctgccatacggtaaaggcatgatgggaaagtagctgagaaggagtggctctcggggaggggtttgagaaccattgtgactcagctcagcgttgtctttttgtaagggagcacacatcctggctcagctgcttgtgtgcccttctgggctctcataacaccccatgtatactctgtcattgctctcaacacataatcttttcattaacagtttaggggctgaagccacaccagactattagctccttgaatcatacctttttcatcttcgtattgccaacaagtaacacatctaatgtatatttggagctaagaagtgcctttataaggtcttgatggcagatgggtgagttaagtaaatggggaagagctcagttctggactgaagtggaagtagaatgggaaacaggaagaagcaagcctaactaaaaagtatttccaagacagaagtataaagaaaaaggacgaacatgccctttataagataaatgcacctttttttttttttgatggggtcttgctctgttgcccgggctggagtgcagtggcgcaaactcggcttactgcacacaacctccccatcccaggttcaagcgattctcctgcctcagcctcccgagtagctgggactacaggcgtgcaccactatgcccagctaatttttgtatttttagtagagatggggtttcaccatgttggttggccaggatggtctcgatctcctgatctcgtgatttgcctgccttggtctcccaaagtgctgggattacaggcgtgagccacctcgcccggcctcatataccacattttaagaattgttgctacattgcttgttcgggaattttcagagactaacaacacactgagtaatacacattctggcttcagccaaagtagctttgcaagcacatgaaagccctttaacatgactgtattctggaagagattaagttaaaaaatatgggccgggcgcagtggctcacacttgtaatcccagcactttgggaggtggaggcgggcggatcaattgaggtctggagttcgagaccagcttggccacagagaaatctcatctgcactaaaaatacaaaaattagctgggtgtgatggcgggtgcctgtaatcccagctactcaggaggctgaggcaggagaattgcgtgaacctgggaggtggcggtttcagtgaggcgaaatcgtgccactgcactccagcctgggcgacggagactaagtctaaaaaaaaaaagaaagcccattaattagagtataccctataacaatcacctacagattattagcctctgtgctttgttgagatatgcagactcatatctaattaacacagaaaaatccattttgttctagcaactcctttcaagccaatcctggaagcttcagttatcagaaagcaaaatggagaagaacatgttgtactcatgtgctccaccatgagaagcaagccccctccgcagataacctggctacttgggaatagcatggaagtgtccggtaaggggagaaatggttctctttgtcttccttcctactcaaatttccaggggatttttaaatgttttggcaccctctagtggcagacaatgccagaagacatcatttaatatttcatcagctcttttccagacaagttattcttacaaccaatcaattttatgccttaatcttgaaaggctaatcatagatattgaaaatgtttttgtttaaaacaggtaaaaatctaaagtgaactataatgacttcttaaaatttcacaaaattgtctaaaataagtataatacagaagtataatatctcaggcgaggcacaatggctcatgcctgtactcccagcactttgggaggccaaggtgggtggatcacctgaggtcaggagttcgagaccagcctgaccaacatggagaaacctcgtccctactaaaaataaaattagctgggtttggtggtgcatgcctgtactcaggaggctgaggcaggagaattgcttgaacccaggaggtggaggttgtggtgtgagccaaaaatcacaccattgcactccagcctgggcaacaggagcaaaattctatcaaaaaaaaaaaaaagaagaagtataatatctgtgagcataaactttttcccagatataaaatcgaaaatatatttaacataatacatataattggaacagatatgatcttccctatattgtatagtactatattgtgtcatacccacaagaacagattaaaaatattcttgtaacaaagcacctaaaggttgagcctttgaaacagaataactaattaattatggtgtctgggtactgtttatagtttgcttacatttcaacagacattacctttgatatctatgtaatcaaccatcttttttttttgagatggagtctcactctgtctcccagtgcagtggcacgatcttgactcactgcaacctctgcctcctgggttgaaacgattcttctacctcagcttctggagtagctgggattacaggtgcatgccacaacacccagctaatttttgtatttttagtagagacagggtttcaccatgttggccaggctggtctcgaacccctgacctcaggtgttccaactgcctcggcctcccagagtgctgggattacaggcgtgagccactgcgcccggcctgtaatcaacattcttagagttgcaaaggaccctttacagttgagaacactgagggccaaatggagttctagagagaaaagacctaaacccagatctgattcccagggcagtgccaattctacttcattataagacttccctttaattcgccttattcatataaccagaataaggtcttggatctttgtgtttcataacaacatcaagctgtccttcttaagctttgaatttttttttccagtagtgaaaagtttgtagaaaaccatcatctactctcattcatctgtttgcctttgtgaccagaaccaagcctatacaagggaactggctgaggttagaatgaggttagaaatctaatgtttgccatgaagtcaaggccattggcctctaatagaaccaacctcatccagtagcattaaatagccataacctcttcaaattgctacataggtggaacgctccatgaatttgaaactgatgggaagaaatgtaatactaccagcactctcataatccacacttatggcaaaaattcaacggtggactgcattatccgacacagaggcctgcaagggagaaaactagtagcacccttccggtttgaagatttgggtaagaagaactaatgattctcttgaataatttttgatttactttaatattacactatcaaacaaaattaaatgcagtgggcagagtccttcagattaagattactgccaacaaagctttcctaatagcaaattcctgtactgattgaaatttctccaggtgagtgacggaattccaactattccaatgttcaaaagaaccccagttgagcagaaagcctagcacagcgccatatgcaaatagtgtcatgcttgctttttgataatgactttaaatcgttttattgctgttgtgtttttggagtaatcatatgaatcatactgcatctttgtacttgacccagaaggagataatgttagctgaaataaacctaaattgtcaatatcattttatgtgaatatgaaacacacagatacatgaagacataattcctgtttagatttattttattgttataattgctttgaagattttagtttaaccatgttaatattctgagttgaacaccattttaaacatccaatattaaatgtgaagaggagttgcctccattctcagaacctctattctatgattctttccccaaaagtccaagaaataattttaaaactgtacacaactctttgagccaagaggtatcctttaagatgcatgagtcctgtaagaagtctgcaattagtaggactctgagtttcactgttttacaaggtacttctctgtgtaatcaaatcctaaagtataaggaattactcacatcagtgaaagaggaaactgttggatgacaatgcatttattgaaaaagctcttttatcagacgaaatcgctgatgctgaaaggcaagcttgcttaggagaacctcactgtgggaaagctgccgtgatgccctgtgggggctgtggctgcggttaacaggccccctctgactaccacaaactttccatgggtcactttctcaccaaaccaaaagtagtcattgcagaagctgcactgtaagactcatggacctacagaccgagctgtacagtaaccttacacaaccacccccacccctctgtgagtcatccccaccccacgcctccacctccagcagtagaactgaagcatagggcatgtgggggatgagcctgtatctaaaagcttcctaaagacattcaggttcttcaataggagaaccaacaatgtcgaaaaaaatgcattcttaattttcagcaattgttcaagccatctacaaaaattactatgaagggggaaatggcagttctccacctttacggctatagctctgtatgactcaaaattatagctaaagatgtttttaataataggctaaggccaggcgtaatggctcacgcctgtaatcccagcactttgggaagccgaggcgggcagatcacctgaggtcaggagttcgagaccagtctggccaacatggcaaaaccccatctctactaaaaataaaaaaatcagctgggcatgattgtggacgcctgtaatcccagctacttgggaggctgaggcacaagaatcgcttgaacccgagaggcggagtttacagtaagctgagatcacgccactgcactccagcctgggcaacagagcgagactctgtctcataataataagaataataggctaagacttaatttttatttgtgatctatttgctgtactcattgccagatctccaaatagtattcaaagagaaacgccagcatcagctgttgatagcttccattagttcattgtttcttccatttggctagctgctactatattgacatatagatgttacaaacattttgttcacccaattaggtaaaaaatattactagctgaggatgctttaaaacacatttacacataagggttctgacccctttcattcctgtgctctgcatggaaggacctgggtaaagtgagggtcatgccagcaccaggactagggtggtcctgaggaaagaagtgccttcctctgaaaaagccacagtgtgatgcttcgagaaagagagtagagcaacaggaattgatttttgaataggctatctttgtttttatgttttgttttgttttttgagacagggtctcactctttcaccaaagctggagtgcagtggtgtgatcgcggctcactgcagcctcaatcttccaggttcacaatcagtcctcccacctcagcccctcaagttgctagtactacaggcatgcaccactacatctggctaatttttaaatttttgctgagacggggtctccctatgttgctcaggctggtctcaaaactcctaggctcaagaaattctccctctttggcctcccaaagtgctgggattacaggcatgagccacctcacccagatttcagaattatcatttatttatttcttttcttgagacggtctcactctgttgcccaggctggaaggcagtgacacagtcttggctcgctataacctctgcctcccaggctcaagttgatcctcctgcctcagcctccggggtggctgggagcacaggcatgagccaccacgccctgctaattttcatatattttgtaggtatggggtttcgccatgttactcagcctggtcttgaattcctgagctcaagcgatccctcaacctctgcctgcctcccaaagtgttgggattacaagcatgaaccaccacacctggctctttttgttgttcttgttgagacaaggtctccttctgtagcccaggctggagtgctgtagtgcaatcatagctcgctgcagcctctacctcccagacttaagtgatcctcccacctcagtctcctgggtagctgggactacaggtgcacacaccacacctggttaattttaaaattttttatagagacagaatctcattatggtgcccaggctggtctgaactcctgggcttaagtaatcctccctcatcggccacccaaagcactgggattagaggcgtgagctactgcacctggtttatttcatctttttagtatttaaaatgcggaatcttggttttctattacttacctggggataggattttttaaatatttgaaaaacagttctcaaacttttgatttcaggacctctctacaatcttaaaaataatcgagaaccccaaagaacttttacttatataggtgatgtctgtcaatatttacctattagaaattaaaactgagaaattaaaaaaatatgtatctgtcaatttattttaaaataataaatctgctacatgttaacagaaatggcatatttgtttttattttattttttgagatggagtgcacttattttttgagatgagtgcagtggcccgatctcagctcactgcaacttccgcctcctgggttccagtgattctcctgcctcagactcctgagtagctggcattacaggctcctgctaccacacctggctaatttttttgtatttttagtggacatggggtttcgccatgttgggcaggctgatcttgaactcctgacctcaggtgatccacctgcctcggcctcccaaagtgctggtattacaggcgtgagccaccgcatccggcccagaaatgacatattttaatgaaaaaaaaagtatattttgtaacactgaaaagattagtgtgaaaatgtcatttttttacattttgaaaatctcataaatgtctagcttaacggaaaacaattaggttcttgtaacttttgcattcgatctcttccaaaatgttattttgctttaaataaatatataaaaattcaatctcacacaaatatataattggaaaagggtagaatattttaatagctggttcagataattgtggctattcttctttgatgttacaccaaaactcaacaagtagtagtttcttaaagattagttgctatgtggactctgggcccatgtcaatgaacttttcatactgttatattaaaacccactgaactgtcttacactttgcttagaatttttacccaggcatgatttttctaacattatgttttagtcatttggaaaatactgattcactaagttctacagaactttccaatgttgatatatttcagcatcaaaatcacattcattaatatcatcaccgatctcatcagaaatctttaagcatttggaggttgtcaaactcacagtggtggatacaagttgtccgaaatttgaactttaagtgtgactattgcaaatgaggagctattttattttttgagatggagtcttgctcttgtcgttcagactggagtgcaatggtgctatctcagctcactgcaacctctgcctcccaggttcaagcaatactcccacctcagtctcctgagtagctgggattataggtgcccaccaccatgcccagctagtttttgtgtttttattagtagagtcaggtttcaccatgttgaccaggctggtcttgaactcccggcctcaggtgatctgcccgccttcaccttccaaagtgctaggattacaggtgtgagccactgcacctggcctaaatttttaatatattttcattttaattaattttaatttaaatagtcgttggagctagtgcataccatattggatagcagaggtctacaatattctgaccaactaggggggtagatcatcatgtgccagtatccacccaattaaaacaacattcagtctaaatgcaatagtttgctagcttgttaattaacaggataaatcaaagtaaatacagagtctagttttaaatatgtatagataaaacttgttttgtacataaacataattttctgaattcacatagtatatactatgttagaagatttaaatcactattgataaattttattctatatgtccccagtgatgtccttcttcttttttaaaattttgagacagggtctcactctgtcacccaggctggagcgcaatggtgtaatcacggttcacagcagcctcgacctctctgggctcagatgatcctcctaccttggcctcctgagtagttggaactacaggggcgcaccaccatgcccagctatttttttgtagagatggggtcttgccatgttgcctaggctggtctcaaactcctgggcttaagcaatctgcctgcctcggccccccacagaactgggattacaggcatgaaccattgtgcccggccccatattcttcttaaaatttattcccagtacttctatttgactagcattccagcttttccctcttttcattgccagcagctctcctctttcttcaattttctctggcacctgtgtggtcagagttcattttagccttatagtctatactattatctctataatgtttccttagtaattctttctttcctcagagcccttacacacaattcaggtatttttatatttttcatacagtttgaatgtttgattaaccagatatgttttcaaaaccatggaaaattatttgattaaataaacaccaagaagcactcacaaattttataaaaacatgaaccacctgtgacgtgtcagtatatatatatatacacacacacacacatacatatacgtatatatatatatatatatatatatatatatatattttttttttttttttttttttttttttttgagagggagtctcctcgctctgtcgcccaggcttgagtgcagtggtgccatcttggctcactgcaacctctgcctcccaggttcaagcaattctcttgccttagcctcccaagtagctgggattacaaacacacacacaccaccacgcccggctagttttttgtatttaaagtagagatggggtttcaccatgttgaccaggctggtcttgaactcctgatttcaggcgatccacccacctcagccttccaaagtgctgagattacaggtgtgagccactgtgcccacccgacatgtcagtgttagtatttgtaaagtgacaggcacagttattacatgcttcctggatgtggctggtaaaacctgttcaatgactggtaaaacctatactaggctgaccctctggaaacattcctaagcattgattaatgttatacaataacatttagcactgtgcttcataaatagctaggcattgtactaaacatgttatataaatgaacttactaattctcacaaaacactcgaagaggtaaatgctgtcagtatctccattttacagataagagaaaaaaaagtgctaggtcgggtatcttgtccaactcattcaggagcaggtaaatagcagcactggaattcagcccagtctgaggctgattccaaagccatctaataggtagatagataggtggatgggtagataaacagacagagggattgattgatggatagaaggacacagatagaaacagtgaatactctttgcctaccactgccaccacacagaggtccagcatgctgtgctttaagccaggcaggtgagcagatggacactcagtgggatacagattcaaaaaccagagcaggagccacagaacacacagttctggggtttctgcacaacctctacaagcaggtagccgctaaatatattctccaatctcttttactgagcacaatgtgggtaaaactgctctctatagtagcagaattttgtttttcccctttcctagttactgatgaagagacagcttcagatgctctggagagaaactctctatcctctcaagacccacagcagcccaccagtactggtaagtgtcaaaatcattcaaacttgtttttaaaaaatcacgtttccttgggaaggttatttttctcattctaagttttaagaatattttttgttttaatttttactaagaccatacaggcccctccaactggctccagctttgtaccatcctagagaagaaccacatcaggcatcggaatacttagtgggatgggcttcaggctgacataaagctttgcaagttcagttctagtttgcctgagatagagatgtacacatgtacacacacacattcacgactgtgacatttgaatttcctctgcagtaaaggacaaagttgaattcatttatagagagactcgtttctttgttttcccatctgaagcacaccaaacacaaaacacagacttggtatcaacaaagagaaaagaagcagaagctggagatttggtgttgtcattgaataacaaaatcacctctgaaggcacatcaattacttgattgtcaataactcaggtcatttttgatgatgggattgaactacaaatacagaataatttagaaagcctggattataattccaattttttagacagtgaactcactagaggttaactcagagcaatgattgtatatctaatttaactttgtattttacctagcatagtatccagcaatagcagcttctcagaaaatgaattacgaaagaaagaaagaaagaaagagagaaagaaaagaaagaaagaaaaagaaagaaagaaaaagaaagaaagagagaaagaaaagaaagaaagaaaaagaaagaaagaaagaaagaaagaaagaaaaagaaagaaagaaagaaaaagaaagaaagaaagaattggttatggtgctttgagcaagactattagcctcatccagaaaggcataaattcctacatattctctttccatttcatgtaatgtgtcaataataatttcatttgttggaataagggctttcagagcattatcatgttcatagttctgagtatcagatcatatttttaaaaatttgtatcctaaataatatttaaaagtaaatgtttgggatttctaaacactgataaatacaacatgtaccatacaattttttgaaggacaatggaaattgaaaatattatgaagtggaacagccacatcacttgctttaataatccaatatttgtaaacgtgtttagaatctagtaatctttaacggcttgctactgagcaactcaattttctgctctgctttttcatatataagacttttaaaatagggtttctaaaattcctttcagctttccatttctacgattttattacatttaatacccattttcaatagaatgggaggcttcattcccctcggggtccacatagtggcgctgtgcaatggactaaaaagcaagaaactgcagagagaaaaaaggaaattggaaacatcagcagtaaaatctggaaaaaaaaaccacacagtttctgattttttataatttatcttatctagaaaaaacatcatagtacatcccacttctaatggggaggcaagcagaggtttgaataactgaagctatatttcaacataaatttcaggctgtaggttttctataattaaagcttggaatgccgttcctcggtgttcagttgttatcttgaagcatcctaaagaccttctccctaataggcctgattcaggatggaaatatgaaataatggtttaaatgctgggctctagagttaggtaaaacagagtttatgtattggctttgccacttatttgctacaggactttaggtactttacataactgctctaaacctccgttttctcagagctgtggtgagaaataatatataccaagtgctcagttcaaggccaggcacagagtaaatgcccaaaacatttaccttaaaaaaataaggcaaagtgagcctagccatttgcaattatgtttgcaagaaatccatagttcacaaatgatctcagtactgtttttaaatttggcttcccaagctgctctgggaagacttacgtaactacagttgtatgtagtcacatgtatataatgcatgcatagctcatgttttatcttctttcactttagtctcagtaacggaagattctagtacatcggagattgacaaggaagagaaagaacaaaccactcaagatcctgacttgaccaccggtaagtgtcacccactgcatttagaataaacactcgacattttaacctcttaatcgataaattcaatggcctttgtcagtcctcccttttcttgacctttctgccctttaggacatgattggttaatcactcccttgtccctccttgatttagttacctctcggcttcttgacatacttttcctggttctgttatttgttgctaaccactgcttctctgtatccattaattaacttatcttcctcttctgacttcttaaatgtgtatgtacttctgattttacttctccatcttttgttcttcccttttttttatatatatatattttttttgtgagacagagtttctttcttgttgcccaggctggagtgcagtggtgcaatcccagctcactataacctccacctcccgggttcaagtgattctcctgccttagcctcccgagtagctgggattacaggcacacgccaccaccccagctaattttgtatttttagtagagatggggtttatccatgttggtcagtctggtcttgaactcccgacctccggtgatctgcctgcctcggcctcccaaagtgctgggattacaggcgtgagccaccgcgcccggctgttcttcccttattttttaaagagtttactcattcccaagatggttcctgttgccactaggcaaaagatttctctcttttttttttctggttttgttttgtttttagagacagggtctctctctgtctcccaggccagggtgcaggggcacgatcatgttcaccgcagccttgaactccagggctcaagagatctcctacctccacctcccaaatagctgggattacaggtgtgagccactgtgcccagtaagcaaaagatttctatacctatatttccagaacatcctcctcagcattgctcccaatttctttccattttctatgtatctgtagctgaattttctgtgatttccccaaactcaacattgctaaataccaaacagcaccttctcccacaaaatcagcttgtccaaagcatcacacaggccccaaagcaacacacgggtcccaaaccttggtgttatctatcactcctatgtatgtgtacaaatatatctatgtgtatatgtatatgcatatgcacacacgtatataaaatcagtcaatttccaagaacttttgagtcttgtctttcaggtattttgtccattgtcactgttaacgtcccaatccaggctctcatcatctcctgcatggagtattataacttcagtttctcctcctctggttcacttttagcaccctaccatcaaaatatctctttatctgcatacctgtgttctaaaaccctttatagcttcctgaagtctacaacacagagcatgagtcccaaacacctcattaggtgccatctattacctacttctgcagtctcatatctacaaagtccttatgagatacatatttttctctgaaaacatcaacccttttcaatcgccctgcccttgtttatcctcactgcccctggtggaagaggagacctcctctcacctctccttactccctcttcaaggccaatatcttcactgaaaacttttttgaccaactcaaccctcagagaccattcttgcctctgaacccctgaacacactatgatataaatacatatggatccagaatttgacatatcttacttttgtttgtttttattaatttgtttatatatagagacagctaatccccaaagcatgtgaactgtgccttctgtaggtccaagcacaatgttctacacatagctggcactccttaattattcattggttaagatgaggtgactaggacatttagcaagactacagcccatagaatcagaattctaggtttagaaagcctttttttttttttttaagagacaggtctcatctgtctcccaggttggagtgcagtttcacagtcatagctcactgtaaccttaaactcctggactcaagtgatcctctgcctcagtctcccaagtagctaggactacaggtgtgcaccactgctcctggctaattttttattattattatttttgtagagacaaagtgtcactatgttgcccaggctggtctcaaactcctggcctcaagcaaccctcccatcccagcctcccaaagtgctgggattacaggcatgagccactgcacctggctagaaatattttcacaagctcatctgatttagcccaaatgccttcctgtagggccacatttaacctaaccaagataaataaattttcattttatttggatagttttttaaactccttaacaatccctcttgctacttaactatattttgctaaaaatcattcctaaagctaatttgaatctcctgactataacttaagtcgattttctcatatgctttctgtagaaataaaaaataactagcccaatagctacgtcacttaaaaaatcttttcaaatcatcacacataattgccttgtttgttgtatgcctgtttgcttgttctcagagaatgaacaatgtaagtctctttaccttcaggggtaagctctttctcatctcttcatctgagctgtctattagcttatatcacattgtagaagtattgttacatattctccagtggcaaaaaaaaaaaaaaaacccaaagtatctaaactcctttttcattttccttatagaagcaaatcctcagtatttaggactggcaagaaagaaaagtggcatcctgctgctcacgctggtgtccttcctcattttcatactcttcatcatagtccagctcttcatcatgaagctgaggaaagcacatgtgatatggaagaaaggtcagtgggcagggaacctgacgggggctataagacgccagaacaaatggctaaaaaaaagggaaattctgtccattaaagctttctgtcagacactacataatctatttgataagtgctgtctcagataagcaattgtttgttttctagtaaactcgggtgtgaatctccagggactatagtctaagagtgtataatcaatagaaactagcatagatccagaaattggcattaaatgatagacacttctattcacagaaggataaaaatcccaggactgcctagcacagtccctacaggaatcaaaaactatgtgttgaattaatgaggtatgagttatgggaggggcatggtaagtctactattgcacagtaacagaggtattatcttattcaaatatacatttctacatgtccatggcatcagaaattagttgcttgattttctttttttgtagaaaacgaagtttcagaacacacactagaaagttacagatcaaggtcaaataatgaagaaacatcatctgaagagaaaaatggccaatgtaagtcaactgtatgacctgagatctgaacaatgaggttcattaatgtattagtcagatttctccagagagacagagacaacagaatatgtgtgtgtgtgtgtgtgtgtgtgtgtgtgtgtgtgtgtgtgtgtgtgtatgaggtgggatttattaggggaattggctcatgagattatggaggctgacaagtccttggacaggaggtctgcaaactggagaccctggtatgctggtagcctggctcagtccaagttcaaaggcctgagaactcaggggaccgccagcgttaagtcctgaaatccgaagctagggagtctcgagttctgctgccaggagagaggagggagtgtattccagctccagcagacagatcaacacatttgccttctttctgattttgttctttctgggcccccaacagaatggatggtgcccatccacatcaagggcaaatctcaatgcccacctactccactcagactcacacactaatctcctctagaaacaacctcatagacaaacccaaaaataatgctttaccagatttgaggtatttcttaatccacccaacttaacacttaaaattaaccatcgcaattaagtagtcgcctttaaaaagaaggaggctgggtacggtggctcacgcctgtaatcccagcactttgggaggccgaggcgggcggatcacgaggtcaggagatcgagaccatcctggctaacacagtgaaaccctgtctctactaaaaatacaaaacaattagccgggcatggtggcaggagcctgtagtcccagctacttgggaggctgaggcaggagaatggcgtgaacccgggaggcggagcttgcagtgagccgagatcgtgccactgcactccaacctgggtgacagagagggactccacctcaaaaaaataaaaataaaaataaataaaaagaaggagaagaatcaaaatctgattttttagcactagaaagtctcctaaatcatcctgtagaacttaaggagtctcatctgcaaaaataaatagtagcagttaagttcatgtagcagaaggtgacttccttttgggaagccatccttgactgtttgacgtcacacacagggataccccaagaccaccagaggatcctatgacacctttgtcatagaagcacgtcttcctccatattgtaatttttggtgtttttacatagctactacaatactcctttaggtggtgagtaatcagatttactctgtatcctcagattctagcacaggttagttgataaatttgtgttaaatgagtgactataggctcaattaattcaagaaggcatgtgtcaggtcctttggatgacttcattgcaattcctgagacaaaatatgtaaagaaaatgaagagaatcgggatgggaaggagattgtgtatgggaagtggaggttggggattgtattcttgataaagatctggaaggcagaagctaggactatagaaaagcaagaatattccaccttccaaccatattatttcctccatacaaactaacttattctacccgccaggagctgcaagaaatacagcgagttttgccgctctattctattggttttactgaggtttttgtaggaggcttgtcttttataacacctctgcctctttaggttttgacctactagagcgtgaactgaaaagaatgaatagatgtactagctgggaaaggaacacaagagaattgactgtgtgaaaactgggggtgggaggggaaaatgtgtgtaaataacatccaagtcgattgtgttgcaacacctgtttctaaatacccgtcatcacatactcacctggtggacaggaaaatgatgttaatatcatgtgtgagttgggttgctccctgagctgtttttcctaggcaagaagaaccaaaacagtgggagtagaattatgtctgttagctggaaaaatggaagcccttccagttcaacttttaaaacaatttttctttctttttttttgagacagggtctctcactctgttgcccaggctggagtgccatggtgccatcataggtcactgcagccttgacctttcgagctcaatcagtcctcccgcctcagccttcctagtagctgggactacaggcacgcaccaccacgcccagttaatttttatatttttagtagagatggggtttcaccatgttgcccaggctggtcttgaactcctggactcaagtgatccacccaccttggcctcccaaagtgctgggattacaggcatgagccaccacgcccagccaactttaagaatatttaaaatgagtacctgcacgactcaggggattcctccccagaaaagtacatcttcaggggtttgctgggggtttcactttctcccgagctcaagccttcactttcatcctccttgccttagcaccctcaaatctagcattttaattgtgttgttttggacatattaaaaatattctctggggccatctctagtctctttgtacagaattgcataggccttgagtgtgatctgccccgaccctatttttgcagtaagccctgttatttctagtgtgcaattttgctaaggcaatatgttatggtcagcaacagattattttacagcagaaatatctgtatattttatttcacgtttaccagtatattgtttatatagtaagacttctttaaaaattatagtataggccagtgcagtggcttatgcctataatcccaggatttggggaggctgaggcgggtggatcacttgagcccaggtgtttgagaccagcctaggcaatatagtgaaaccccgtctctacaaataatttgaaaattagctgggcatggtagtgtgtgcctgtaattccaggtactcaagaggctaaggttagaggatcacttgagcccgggaggctgaggctgcagtgggccgtgatcacaccactgcacttcagcctgggtggcagagtgagaacctgtctcaaaaaaaaaccacgaaaaacaaaaaagaatataataatgccttcagaccatttatatgcatcagtaagttttaggtttttataaagcaatatgtgaacctaaaaatatgatatccaatcaaagtgtttcaagtaaatgggtgcaatgttattcaaaataaatattcatcttcaacatgtttttctttcagcttcccaccctatgcgttgcatgaactacatcacaaagttgtactcagaagcaaaaacaaagaggaaggaaaatgtacaacattcaaaattagaagaaaagcacatccaagtaccagagagtattgtgtagtgctctctgcaatggaacatgtgatttcagggttgccgcagtgtcacctcagtggaccagcctgggggaaggagcttaattgctgagacattaataatgacctcttagtgcaatgcaagatggtgtcctcggataatgatctgccccggagctagggcagcaacatgaggaccaaaccatgcacataaagcttgtagtttaaaaaagaaaagcaaaaaaataattatgcctgacactacttcagagcaggaggattctacgaagccttggggatcagggtcagtgtgagcagctaacatcctacctcaaatggaacaggattttttgatgctttgctctaatggaactgtttaaaaaatttttttttctttttaatattttcttctggtcacaaaataaagaaatttgggatgcaaagtacctaaagatctctgatcctaagaagttacttctggccaggcgcggtggctcatgcctgtaatcctagcactttgggaggctgaggtaggcagatcacttgaggtcaggagttggagaccagcctggccaacatagtgaaaccccgtctctactaaaaatgcaaaaattagccaggcgtagtggtgcgcacctgtagtctcagatacttgggaggctgagggtggagaatcgcttgaacctgggaggtggagattgcagtgagtcaagatctcaccactgcactccagcctgggcaacagagggagactctgtctcaaaaaaaaagaagttacttccaagacagacttttaagatgtaaccagcacaaagcaatgtcagggaggagtgatacatgacaataaatgagtcagatgagcaagaaggccccagaacccatgccccaaggcacaaagaggagctcagggtaggcccaaagattcgaattccttagattactaaatcacatgagcggaccttgtctgtcagataagatttttacctggaaattccatgaccaatacatgtgcaaaagaaaatgatgggttgaatttactgattattgacctaatggatggctttttaaaatgttttaataaaaagcagaatagatgtttgtttttctagtggttataccaagttatacttcctgttttcacgtgtgaaagtaacatgggacatgcctttcttttccgatcagtttatttaagctatacagcaaactttggcatttatgtggagcatttctcattgttggaatctgaataaaccaattacaaaataacata

SEQ ID NO: 22 - DNA, 16933 bp, Homo sapiens
gtatagcagaagctttttcacatctatgacacccgctatgtcttggtaaaccctggaagggaaaggaggacaaggttaaaatactgttccgaggacctggtctctccacagcgcaggctggaggtggcagcccgtggaaagccaagttcatccaccatcggagcccaggccaggctgccaaggctaatattcaggacaaagccaggcacaggtcgggaatcctatgaagatgatcatcgtcctgaggtcttccttccagggttgcatccgcgacagaagatggaaagagaaatgggtgagtccctgctaccacaccaccctcaggttgcttttttggctgaacaagaagggtcctcccaggcaggaagggtggggcacagaaacgtgagccaatgtggatgacttggggagggctttgcagttgaatctcctgaaaacagcaagaagtacagacctccgggcattctagactcagattctgtagacgcttccctttggccgagccaagccagggttgctcaggaactggggtccttgagattggattagattggacggaacgacacaggattgcaacgtgctgaactgtgaggaccggggtttagcttgagttccccagtctgtccacgaggtccaagcttgagatcattacggcgaccacatctcaggaggaagataggtcagcaacgcagtgacgtgctggaatagttttgaaatatttgaactattctaatgcaaactcttcttttaatgacatttcacattgcatcttgtgtcattttatttctgtagatgttgtctttccacttgacatttaattggtgtttaatttaagttgcaaatattgtgtatgtatctgagtctagtgtgagaatcactactctatgcctgtgcatcccacatcaagtaacgtttttgagtgagggagctgtgccatgctgaatctgcagcatgccttggacataagcatgtagcttgtcttctccagcttggaggagagtctcagaggaaaggtcttagaggaatgcaaaggtggaggggtcctcataatatggaacaacgacagctctgtatcacccttcttatggaaaaacccagaataactgcccatgtgttctgtgaccttggattgtggaggaacagacggatgtcgattctgccagccactccttccccagtgggcagcacatccttgccccccaaccttcctgggcacctggagttcagatactaggggaatattaatcagggtccaaccaggaaaacagaaacccttctctgcagttaacagagagggaagtaaatgcaggacggtgcccctgcattggatcccagcacaggcaaagaacgttagtggaaagatgatgaaatccaaagaaagcctgtcagttaattattgtaccagtgttaatttttttttttttttggcggatgtgctggggtcgtgtaaagcatgaacattagagggacctggatgaagggcatatgggaactctctgtacctctgcaactcttttgcaagtttaaatttattcccaggtaagaagtgtgtttaaaaaatgaattagtcggccgggtgcagtggctcacgcctgtaatctcagcactttgggatgccaaggtgggcggatcacctgaggtcgggagttcgagaccagcttgaccaacatggagaaaccccgtctctactaaaaatacaaaattagctgggcatggtggtgcgcacctgtaatcccagctactcaggaggccgagacaggagaatcgcttgaacccgggagccaagattgcaccattacactccagcctgggcaacaagagtgaaactcagtctcaaaataaatatataaataaataaataaataaataaatcagtcaacaaatacatatcaaaaaggaaccagtggccacatggaggcaaaggagcatgaggaatcttctgagcagtgaagaaaatcttggatatgttggtggtttcacagctgtcagaattcactgaattgcacagattaagtggatgcagtttgtgtgcaaaggatcctttgataaagctgaataaaaatcactaatgaagacctaaagtgaaaagaggcagggaggataatctaatgcatagaaaccattatgccagtaaaagaagagtcagaagcaggaaagtcattctcaggagccactgtgttttggcctcatgttcaatgctaagtttcaaaacaaatgtagtattccttgcaaccatgagaagttggtgagtgatttgaaatcattcttatgatgaggtggaagcttttggaatctgtacccctgcactttatccttgtcctcatgatttacaaaaccatgaaaataaagctcagttaattcatcatcatcaaggtgagctccaggttcagtattcagcttgaggctggggactccatctttctttaacttttgactgcatagccttcacttagtttttatatctcttaggcattacaaaaaattaggccaggcgcggtggctcacgcctgtaatcccagcactttgggaggccgaggcgggtggatcatgaggtcaggagatcgagaccatcctggctaacaaggtgaaaccccgtctctactaaaaatacaaaaaattagccgggcgtggtggcgggcgcctgtagtcccagctactggggaggctgaggcaggagaatggcgtgaacccgggaagcggagcttgcagtgagccgagattgcgccactgcagtccgcagtccggcctgggcgacagagcgagactctgtctcaaaaaaaaaaaaaaaattaaaaaaaatatatatttttttagatggagtctggctctgtcacccaggctggagtgcaatggcacgatctcggctcactgcagcctccgcctcccgggttcccaccattctcctgcctcagcctcctgagtagctgggactacaggcgcccaccaccacgcccggctaattttttgtatttttagtagagacggggtttcaccgtgttagccaggatggtctcgatctcctgacctcatgatctgcccacctcggcctcccaaaatgctgagaagattacaggcgtgagccattgcacccggcctaaaaaatctttaacatattatattaagcagttttagttggtttattgttattttttagatggattgctgtcttatggactcacagaaaattggattagattggaaggatataccagggactgtaacatgcagaactctttgaggaccagggtttagcttgaattcccctgtctgtccacgagatccaagtttgtgatcattactgtcaccacgtctcaggaggaagactggtcagcaaggcagtgatcatgctggaatgtttttgaaacgtttggactattctgatgcaaactcatcttttaatgacatttcacactacatctcatgtcactatatatgtttttaaatttttaatttttgtgtatacatagtaggtgtatatatttatggggtagatgagatgttttggtacagcacgtgactccctcttagttatgcaaatttctccagcaagtcgttgcccagcagcctacttgaattcctcccctgaaaacggacttttcttttctaccatgtggctagtccgcaaatttttcgaacttttacactttgcttctcttttaaatataaactctacctttaggtaatttctttgctcccacatctgagcctaggttggtacaagaagccatgccacttgaacactttgttgcttagaaatttcttctgacttggccaggcttggtggttcacgcctgtaatcccagcactttgggaggccgaggcgggtggatcacgaggtcaggagatcgagaccatcctggctaacacggtgaaaccccgactctgctaaaaatacaaaaaattagccgggcgtggtggtgggtgcctgtagtcccagctaatcgggaggctgaggcaggagaatggcttgaatctgggaggcagaggttgcagggagccgagatcgcactgcttcactccagcctgggcaacagagcgagactccgtttaaaaaaaaagaaaagaaatttcttccgccagacaccctggcgtggtatctctagggcatggacagaatgcagccacgttgtttgctaaggcgtaacaaaggtggctttcgctctagttccaagtaagatccttatttccagctgagaccttgtcagcctggacttcgctgttcacatcactatcagcattttggtcacaaccatttaatccatctctaagaagtttcaaacattcccttctcttcctgtcttcctccgggccctccaaataacatgaggtctattccgttaacaaatttcaagtgaacaagacgttattgctgacgatgggtcgtatgtggtgcagcagatctctaggcctgtttgttaataactccccatttccccctcctcccagcccccgtaaccaccattccctgctgtgatgttgtgactctggtgactttgcagatctcctgtaagtgacatcatgcagtacttggtctctgcctctgcgtcgcttggcgtgatgtcctcaggtttcgtccgtgttgtcgcccatggcagaattttcttccttgtttaaggctgaatagtattcccctgtgtgtgcaccacattttctatatcaattattctatcaatggacatttagatggttttcacgtcttagctattgcgaatagtgctgcagtgatcaggggagttcagacggctctttgacatactgattttttttttttttttagacagagtcttgctgttgttgcccaggctggagggcaatggtgcaatctcagctcactgcaacccctgccttctgggttcaagcgattctcctgcctcaaccttccaagtagctgtgcccaccaccacacccagctaattttttgtatttttagtagagacagggtttcactatgttggccaggctggtctcgaatttatggcctcaggtgatccacccaccccggcctcccgaagtgctgggattacagctgtgagccactgcgcctggcctgtttcttttaaatacagacccagaagtgggattgctggaccatatggtagctctatttttaattttttgaggaacctccccactgttctctatagtgattgcccaatttttaattcctactgtggtatgcgagggatccagtttctccacatcctcaccaatagtctccttaaaaaaataatatgctttgtaggatatttttaacgtgttaaataccttgtcgggattttagcatagatcacaatattaaaaacttggggaaggatttctatggctcccatttgtaatacaaggaaatgtcagcttctagttttgtaacgtcttgcccaagagctgcgaccgttaacttgtggagttgggacggcgtccaagtcaattggttgcccgacctttattctgccttgtcccatagatttagaaagaggctgacacatctggtaactagtttacggtcatctgcctctaagcgacatttagggtaagcgacatttttcagaaaccaaggccctccctctcgtctcactagtgggaagggtggaaagaacaggacagaaagctcttcctcttgtgtgaggcagttgctgtggaagccccataggcaggaggcccccgggcagcacatcctgtctgcttgtgtctgctgcagagttctgtccttgcattggtgcgcctcaggccaggctgcactgctgggacctgggccatgtctccccaccccaccgccctcctgggcctaggtgagtcctggaggcagccgggaggctggaaagggggtcgggaggtctggaaaattccctgctcaagcctgactctagtccagaagattctggggaggaaagtgtcctcctcctcccaagactgccctgctgctctccctggggcctaagtctgatcagagaagatcttgtcctaaaaacaggggcccgggtgtggggatgaggtcagctttaagaagggctgggggagcaggagcctttttggaggaggagactttgggatttatcttgaaaccattttgcagcaagaaggattacatggagacagtgatgtcgaggagggttggcttggtcgttatgaaatgctgaatgccccccagctccatcgagcccccttttgacagcagccccgtaaggagactgggcactgggcatttttctcactggggcttctcttccagtgctctgcctggcccagaccatccacacgcaggagggtaagtcatgccttcgtcccatcttcccagtcccctctgtcaccccaagggcagtgctgggtgggagtgatgttgattcttagagggcctggagagatccctttaaatataccctagattgcaaactcttccaaatgtaaaatgcataaccaaccctcacccagttctctctcgcatcctccacctgtcttattttgcttttcttattttcaaaaattttatttttaattgacaaataattgcaatttgcggggtacagtgtgatattatgacgtatgtacacattgtggaaagattaaataaagctgattaacatatcagccccatcacatacttattgtgatgagaatattttaaatctccttttagcaattttgaaatatacaataaattattatgaactactgtcattctgctgtgccatagatctgaaaaattcactcgtcctggctactcgaaactttgtatcatttgatcagtgtctctcccatgccccgcacctgcagcctccaataaccaccattctactctgcttccgggtgatcaacttttcttagattccacagataagtgagaacgcgcagtaattgtctttctgtgcccggcttatttcacttagcctaacgtcctctggttcatccatgttgttgcgaatgacagaatgtccttccttttttagggctgaataatattccattgcatatacacagcacattctcctcatccattcatttggcggtgggcactcaggttcttgccaggtcttggcggctgtgagtagtgctgcggtcaccctgggagtgcaggcgtcagctccgcacaccgatttccacaatgagaattcaaacccaacacaaccaaggctgagcccggcacttttccccagacgagcccacacttcactcggcagcttcttggcggggaacatgacagtcacaaagggcagactctgaacactcatcctcttctccatcctcctggatgcaccatgtcacccagtcctggtgatttcactctaaatttttctcatctttccctctctcttcatcgacttttcctgcatcacccccaggtgacagcccctctcccctccgtggctccccgaggccggcctcagcctgtccatgccactgctgcctgctcccttcctgaccccagggactggcgatttgcaaaagcacaaccatgaccattgtactttccacagtttttaaattgtattcaaaaattttcatttaatatctcatcgtaagatgaaatctttttttttttttctcagagcccttcccctgtttatcttcagatagaatcagacctgtgcacctctctttggtctggacatgcccattttcccagccacatcctgtccctgtgacctggggctcactcatctctacattcctccaggttctttcgctttctcaaacactccatatgccgctcaatatggtggttcttctcacatgctgattttgaaaaaaaataattcattttaaaaatgaccaatgaggctgggtgcggtggctcacatctgtaatcccagcactttgggaggcggaggtgggtggatcacttgaggtcagaagtttgagaccagcctggacaacatgggggaaaccccgtctctactaaaaatacaaaaattagctgggcgtggtggagtgcacctgtaatcccagctactcaggaggctgaggcaggagaattgcttgaaccttggaggcggaggttgcagtgagctgagatcgcgccactgcactccatcctgggtgacagagcaagactctgtcagttcacagctgcagatttggacaattctttgatcaataccggtcctcccttctggaagtccacctccaaacggcaggcatcctgtgtgtgtttctcacatttgtggaattagcagcccatgaaaaacgtctttaaacagattgataagtaactgagatatggttaaaagaaagaaaaatgaacaaatgggtgggtttggggagatgctggtcaaaggatagaaaatttcgtctagacaggaagagtaagttcaggattgtgcaacacaatgactagagttaatcacaatgtatcatatgcttgaaaatcactaagagggcagattttaaatgttctcaccacaacaattaactacgcaaagtgaggttatattaattagcttgattcagcgattccacagtgtatacctgtatcaaaacatcatgttgtacaccttaaatacatgcagttttaatttgtcaataataaggaatgaatgaagacgggacgagtgaattgaagccctgccagctctctgccccgctcagggattttgctaattttgacacaaccttcctgtttcagggcgtcaaacccgcccttcctcctccaccccaagcccagttgagataaatggggtttttcaagagccttaataagaaggaaatgcaaattaggctgagaagaaagtagaaactatagaggaaaacccagaggtggtgtctccacagagatctgcattagcaatggggacctgtcacgggctgggcatctgctgtgagcagatcagggctgggggcttcaccctcaccccaccagaccctcaaaggagcctggcaacccccgtcccacactcagtcccacccggggaccggccagtgcccttcaggccccagcacaagccatctccagagccctcgcttctctgtcccttgtccttcaccaatgaccctgtcatccccatcctgtgcctccctcccacactctgtccctctggaaagtggccctgggctctgcagcaggcatgaagggctccaggctgctccgacacttcccacatgaccctgagcaaggcccaagttgtgagcaagtctcagggtcctcactgtcaactgggaaaaaactctgcagtgatgagaatcacatgcacgtagaaggtgcaggaggcgtgggaatgttctaaggttgggctgtggtcatggctgcataactctataaaattgctaaaatccctgaattgtgatgctaaaatgacgtgtgtggcatggtgacttcctacagtggacgctgagatcctgctctgcttccctcctagaagatctgcccagaccctccatctcggctgagccaggcaccgtgatccccctggggagccatgtgactttcgtgtgccggggcccggttggggttcaaacattccgcctggagagggacagtagatccacatacaatgatactgaagatgtgtctcaagctagtccatctgagtcagaggccagattccgcattgactcagtaagagaaggaaatgccgggctttatcgctgcatctattataagccccctaaatggtctgagcagagtgactacctggagctgctggtgaaaggtgaggacgtcacctgggccctgccccagtctcagctcgaccctcgagcttgtccccaggtccctggaccctgtcccagctgctgtcctctgtggccaaccttgtcctcctcctgaccccaagccctcccctccccttcttcctctgcacacacctcccctctgccctcacacctgcttaggttcctggagccctggtctcctctggacgccacggatggcgtggacactcagctccagcatctggtgggctcagagctggctctgcttggctgggtggggagtgggttcccagagattagggggcaacccccctacaagaggatgagtgtcttttcacacgggatggatggtcccgcttattcctttccactgagccagaacctgccccaggcaatgtgcttctcctggtgtggttcatctcccactgggcagaacgcagggtccagggatggcccctgaccagggcgggacagtgctttgggaaaacctttggtatgtgaccacatgcacccctgtgtgtgctcagcccgagatgtcctggagtcaaagtccactggagaggatccaacccatcttcatgtccctccaggacctcagcagtcccctgaggtcaagaagagcttgtggtgggaggagcagagggagtgaccagccccagggagaatggggcaagcagcggggctctccccagcctcctgtcccctgccccgttttctcaggagtctcgagacattgtctgggattgcgtgatggtcatgcggcctttggatgggggctcagggtggaggagggcaggttggttgggacgggttctaaatccttctcctgcccctgtttacagaaagctctggaggcccggactccccggacacagagcccggctcctcagctggtcagtagcagggccctcagctggaggggattacaggggaatctgtgctgcggatgctgttccgggtccagccctctgccctgggcttggagtcaaggtctagggaggccacgggaaggcaccgacacccaccaagctctgggaggtcgctaatgctcacagagaccatagcagcaatggtaccgtgattgcaaccttgttccatgccaggaactgtggaaagcacttaatgcaagcaccacttaatgggggaggtactagtctgatcctctaactcctcctcctctctaatatgcaaaacataaattaaagtttcgtgcttaacggcacaaggccatgaaggggcaggggccacccacccgggcagccccaccccagacttccgggctcgcccgagctccacgctgcccccttgtgggcgtggcctcaccattcaccccgctctgcacctgatggagggacttagaactcaccttccaacctgggacacccggagagggacggggctgctcctgttggctctgtgatctccgggggaggcctgaacggtggagtaaggtcccttaagaggaggagggctccacagggaggggacgtagctgtgaacggtgaccaggatgaagccatgaggcttcccttccatctggctctgccctggactctgtgatgggattgaagctgccccaagtccctgggtctcaagttgtccatctccccctgtgatctgtgaccagaaactcccaggggaggacacggggtcataagccattcgcggccccttccccacctgggtttctatccccagagtacgtccttggacctagacccggtgactgcctgtgaggctcgggctgtgagctcaggcaggtgggaccaggggctgaagccacatggggaggtgggaggagcgatgccgtgctccatccggaccccctcagaggctcctgggctgctggggcacagcgggacatgctcctgagtcccgcagacctggttcaagtccagtgtctggtttttattagccttctgtctgcgggaatatcttgcctctgtttctctccctctcttcttctccttccttctctcttctctcaccttcatgcagtgacatataaaggtcacgaggacagaccctcctgcagccagattgctgggttcatggttcaaatcccggtggttctgccacctcctggctctatgcctgacggtgactcacccaaacctcctgtgtcccaaattcctcatgtgaaacagaggcaatagaagagctgtcctggtagaatcgtttagggcagacttgagttcaggtacacacggcgctgacatcagtgctgattagaaaaccccaaaggagggatgctcctattaatactgaggaagtattttgtcctcacagggactgtgccaggcactgaagcctccggatttgatgcaccaagaatgaggagaaatggcctcccgtcttgtgaacttcaatggggagaaatagttagaatgagcaatagaaatgcactgattcccatacatgcatatacagataaaaatatatgatttgcaatgtagaatttcagacctataatttaaattatattatatatgtttacatcataatatatatatatattatatatatattatatatataaggaagataattatataataaaacatgttagtgtatcactacatatgactatagtgtatattatatattatatgaaagatatatttacaatatatagtataataaatttcaagtgttatagttaataaataaatataggtattaatgtaaatatattatctattatgtatacattatgtataactataatagaaaaaatattttatatttaatcataggtttatatcaaatataaattatacattatatattatagtgaatatatgtaacatatattataagttataaatcatatacaattaacattatatacattaaattatatgtatatgtcaagattacataattaaaaatatatttgttatatattatacatttgcataatacatgatacatataactataaataatataaaaactgtaatattgcacatatataatacatatgtaattttaaatggtggcaaatgttatgaagaccaagcccaggaagtcatggtgtagaataacgggtggtgtcctggaccttagaccgtggacgaggcaggagggaaggacattccaagagagaatgtctgcctttcttgaaggatattgaagatgctgcctcagccccgggggaggggagggaccgctgttcctggaagagggacgcttggctcggaccctgggtttgggggagcccctcaggaccccatttagccacctgggaattgggtagtggcgtgcactgtgcagaggagggtgaaggttggaggagatgacgggcgggcctgcaatgcgctgcgtagggagcctgggcggtgccccacacactcgcccgctagctgcagggcttcaggaaagaggagcacatcgggacttggattcttcccacaggagggcgggttacatccccgtcagagggttgccgggagggcagataaaatcagacatgaggattcttgccctctggtgggaacccagaaggaggtcagggagggaaggtctcccttcctcttgttgcgggtggttggtctctgcctagatccgcagagggcagaaattagcgatgtctactacagcttcacgcccaggaaacgcgctgtatctgcaccgtccagtagggatggcatcaggcccgtggggtcactgagtcctggaggtgcagacggtgcagccagcttctcatgccattcaactttggataaatttaaatatcaatagctatgtgtgactctcatgctggacagtagatgtagaaagtttccatcatcacagaagactctgctggtcggtgctggtctagagggagcagtcagggtcctggggagtgaagggagatccccacagtggatgtgggaggactcagagccttctctgtccagctcaggactctaactcctcctccttctgattcctccctcccaggacccacgcagaggccgtcggacaacagtcacaatgagcgtgagtgatgggggccgtggagcatgaagctggtgtgtgcctcttggggaaggagaaagaggtcaggctttggggttgatcagattcctgctctgccaatggcagtctgtgtccctgtgcagaggactccagcactcaggaccccggtggtggaagaaggggataacgatccctgtactgcaggactattatttacctaagatattttatatattagtaagtctatgaaacgcacgtgacgtgtgtgtggtatacagtaggtgctcaataaatgcacactgctgaaatcctgtttctgtctttcttagatgcacctgcttcccaaggcctgaaagctgagcatctgtatattctcatcggggtctcagtggtcttcctcttctgtctcctcctcctggtcctcttctgcctccatcgccagaatcagataaagcagggtaggtctcaggggcagggtggggtgacctgggaagctgtcaggagaggctaggaagaaggtctccttaattcacaccccgactgtccttagggccccccagaagcaaggacgaggagcagaagccacagcagaggtgaggcccctgggaatgactcctggacctccacccagtcctcggccgccaggctgcccctgaggttcacttttatttttcctcttaggcctgacctggctgttgatgttctagagaggacagcaggtaaagggggaggaggagggacaggcctgggatggggaagtggggacttggtgccaatccagatgcaatgtggggggtggggggaagaatctttgggaacattctagaaggtcgtattatacattgggtgcaggatgtcatcggaagctgggggtgggggtctcaggcagatttgccttgcgacatcctccccagaaaactgaccatgtattttctccccaagacaaggccacagtcaatggacttcctgagaaggacagagagacggacacctcggtgagccttcctactagttattaaagtaccccaaatttagcagcttaaaaaaatctcagttccttgggttaggaattcaggagtggctcagctgggcggttccggctcacggcctgtcctgaggttgctgtcgagaggtcgcccagggctgtgtgcatccgaaggctcccgtgggctggaggatccacgtccaagacgctcacttccccggctgtgggcaggaaacctctgttcctctcacaggggcctctccacacagccggcttcccccagagggagggatccaaggatgggtggcagggaggggacagaagcaccatgtcttttggctcagcttggaagtcaggagtcttcccttctgccttgttcattgtcacgtaaaccaaccccaataccctgtgggagggctcttcacacggatgcaatttaggagagggtcctcagggcccatggagatggccgccacagccctccctccccacagcccctcgtctcaccctccaccaggcactccctcaccctgggtctctccctcttaggccctggctgcagggagttcccaggaggtgacgtatgctcagctggaccactgggccctcacacagaggacagcccgggctgtgtccccacagtccacaaagcccatggccgagtccatcacgtatgcagccgttgccagacactgaccccatacccacctggcctctgcacctgagggtagaaagtcactctaggaaaagcctgaagcagccatttggaaggcttcctgttggattcctcttcatctagaaagccagccaggcagctgtcctggagacaagagctggagactggaggtttctaaccagcatccagaaggttcgttagccaggtggtcccttctacaatcgagcagctccttggacagactgtttctcagttatttccagagacccagctacagttccctggctgtttctagagacccagctttattcacctgactgtttccagagacccagctaaagtcacctgcctgttctaaaggcccagctacagccaatcagccgatttcctgagcagtgatgccacctccaagcttgtcctaggtgtctgctgtgaacctccagtgaccccagagactttgctgtaattatctgccctgctgaccctaaagaccttcctagaagtcaagagctagccttgagactgtgctatacacacacagctgagagccaagcccagttctctgggttgtgctttactccacgcatcaataaataattttgaaggcctcacatctggcagccccaggcctggtcctgggtgcataggtctctcggacccactctctgccttcacagttgttcaaagctgagtgagggaaacaggacttacgaaaacgtgtcagcgttttctttttaaaatttaattgatcaggattgtacgtattcaaggtgtaaaatgtgataatttgtcgtacacgtacattgtgcaatgacagtcacaatcaattcctcagcgcacccatcgccacagatacgatacattagatattctgaacttgctcatcttaggacttcacattggtgtcagtgttttctgacaaatcacgtgtatcaggaatgaatgagggaggtgtggctgggtgaaggcagagagccgaccctacaggtccacatctgcacatacatgcacaggaatgcatgctctcacacacatgcatacacacacgcacacacacagacatgcacatacactcacacgccccaggaaatccaaggaatcactgagcctgctgttggttgaggcatttctgagtatccaccctacctgtagggtcagatgtactgattgacacagaaaattaccctatgtaccactaggaggcggcagaatctcatttgggttaatctgtgtttgtctttaaaaaacaaaaacaggccgggcatggaggctcacgcctgtaatcccagcactttgggaggctgaggtgggcggatcacgaggtcaggagatcgagaccatcctggctaacacggtgaaaccccatctctactaaaaatacaaaaaaattagccgggtgtggtggtgggtgcctgtagtcccagctactcgggaggctgagggaggagaatggcgtgaacccgggaggcggagtttgcagtgagccgaggtggtgccactgcactccagcctgggcgacagagcgagactccgtcaaaaaagaaaagaaaagaaaagaaagatttttaagaattcagcaaaaactcagccagctctttctatggggcagttgctaatttagttctaggcaaacgtggacacattaaattctcctacaaaccctc

SEQ ID NO: 23 - DNA, 11233 bp, Homo sapiens
tgagcccgcagttcctgagagaagaaccctgaggaacagacgttccctcgcggccctggcacctccaaccccagatatgctgctgctgctgctgctgcccctgctctgggggagggagagggtggaaggacagaagagtaaccggaaggattactcgctgacgatgcagagttccgtgaccgtgcaagagggcatgtgtgtccatgtgcgctgctccttctcctacccagtggacagccagactgactctgacccagttcatggctactggttccgggcagggaatgatataagctggaaggctccagtggccacaaacaacccagcttgggcagtgcaggaggaaactcgggaccgattccacctccttggggacccacagaccaaaaattgcaccctgagcatcagagatgccagaatgagtgatgcggggagatacttctttcgtatggagaaaggaaatataaaatggaattataaatatgaccagctctctgtgaacgtgacaggtaaggcacgggctccaagagaggccaaaggcaaatgtgatgagggctttagggcacggctgagacgggacacatgtcctgggagggggccgggggtgatggactcaggagaggagctggaccagagcctgagcttccccaggaccgcaccttggatgcccctcctgatcctgcaggcccctcccctcaccagccctgacccacaggcctgacatcctcatcctgcctctgacgctggcattgtggcatgtggggccttatgactccttgttttggggcctgtcctaggcatggccggggtttagcaccatcccaggcctctccccaccagatgccagaagcacccactccacccatgcagtgagacaataacaattatctccacacattgttaaacgtcctggggggttaagtcctccccagttgagagccttaggtctacacaaccccgtgactctctcaggccaggccagggaggaagcacttcctggcgcaaaccaagggcagcagaggcacctgagcctggacagggagactcagcacacggcccctccatctctcatgccctgaggtcctcggagatccacatttagatgctcaaaagacaggagggacctccacgatggtccagaggccgggagggcaggacctacgtgtctggtgcaggccctggtgctccagggaagcccggaggtaggaggtgggacacggtctcttctcctccctgggtgggtctctagggtctctgagcttcagggtttccttcactctgtgcagagggaaccagttcctatagcatgtgggtttgtagtttctctttcgtgctgggttgaggtctccagctcctctccagcccctctccagccccctgtgggtcccacagccctgcccctcctctccctcccacttctctgctcacacaaggagcccaggaaccctctgtctcagagatgctgctgcctctcttgtgggcaaatgaagagagggacagtcggggctgggctgagcctcatttccccacagcgtcccaggccccactgtcaagatacaggctggaggtgctggagttggtgatggtgcaggagggctagtgcgtctctgtgccctgcagtgtcctttaaccctattacaactgaactgactctagccctgtccatggatgctggtttaagaaagggatcaatatacaatggaataatccagtggccacaaacatcccaaatggaaaagtgcaggagacacggggccgattccacctccttggggacctgaagaccaacaactgctccctgagcatcagagatgccaggaagggggatttgaggaactactacttccaggtggagagaggacagataagatggaattacaaaacgaagcagctctctgtgaatgtgacagataaggcacaggctccaggagacaccacagggaaaggtcatgggggtggcagcgaaagcctgggatggggcccctgccctgggagagggctgagggtgaagcgagttgggctcagggcagaagctgaaccagagcctgagcttcccccagggctgtaccatggatcctctgtcctgatcctgagtccccctctcttcaccagccttgacccacaggcccaacatccttatccccggtaccctggagtctggctgcttccagaatctgacctgctctgtgccctgggcctgtgagcaggggacgccccctatgatctcctggatggggacctctgtgtcccccctgcacccctccaccacccgctcctcagtgctcaccctcatcccacagccccagcaccacggcaccagcctcacctgtcaggtgaccttgcctggggccggcgtgaccacgaacaggaccatccaactcaatgtgtcctgtgagtgctgagccaggacgccctggtccctgatgagggggggacgtccctgagggcagaggatggggtcagggctcgacactgggtgctgggtcccagaatctgggctggttgtgggatcaggaggacgctggctccgccttccccatttatgcagctcctggggagacagggccagtgtccccagccctcacagtgatgcaggtctccatgtctttctgtcccagaccctcctcagaacttgactgtgactgtcttccaaggagaaggcacaggtaggatggagccccctccctggggctgggggagcagggccttcagctcagggcagggccaggtccctcctcatcctggactcaccctggtgatatgagactcccttgtagttgaacccaggcctcctccccatccttagcctctgtggccacctgagcacctgtcctcttccccccactcccctcagactcttgcacacacaccctcctcagccctgcagccaggacagggggaaatacatatagcaggagcagcctttgggcctcttatcttccatctcctgaatatgccacctaactcgtctttttattttacccaatagttttgagctacgttcttttggatacatgctataatcacgtgggcaaaaattttaaattcacagtaaaatgtgtccccagaatcaaccagggtctgtccaggctgtcctgagccttggtttgtgcacctggaagatctcagaggtggtttgatgtcagcagtgagactgtttgcaccctcttctagggatgtgtgtgattccactgtctgaatagtctctgattttgtggcatctcctaatggaagatcatggcactaattttatcctacggcacgaacactgcaatgaataatgttgtatctactcccacaaggaatatctaagtgtataggataaattcctaaaagcacattttaccagtgtcatatgttctttctgattttgaaagatatggtgaagttgtcctcaaataaaggtgggcaagtttacattcccaacagtgagcggtgaacataagtatgtccctgcaccagcctacatcactctctgttccattccccagtctcattctgtatccttcctccctgtttcaatcactttgtctctttgaacctccaactttttctctacagcatccacagctctggggaacagctcatctctttcagtcctagagggccagtctctgcgcttggtctgtgctgttgacagcaatccccctgccaggctgagctggacctggaggagtctgaccctgtacccctcacagccctcaaaccctctggtactggagctgcaagtgcacctgggggatgaaggggaattcacctgtcgagctcagaactctctgggttcccagcacgtttccctgaacctctccctgcaacaggagtacacaggtgggtaagggaggggctggaggaggagaacacacctgccccaccctcatgggccacccactgcccctgagcttcaagggggagctcagctctggtctgtgctcagctgtgaggcctggaacttccctgcaacccagggcactgctgtcctcttcctgccaggaaaggtgtgtaaggcaggaagaggggaggagtgggtcttggaggggaggagctggggcctggacaggtgtgtttggggagacacgtgccttgctttccagtgcctggactagggtgacacaagcaaggcactcacttctgggcacacgactaaaaaacaaaaaataaaacaactcagcaagcaagtgaaataatattggatgtgattatctttattaaaaactaaaaattattgcaaaataatttgacagtgaatacaaatcaaaatttcaaatacaggcaggctgtgcttaccactctcatgcctcagtgacctcaggagttgtcccttcctcctccctcccattcttgccctttgtttctgggaagggggattagggtacccaagttgggggccttataggaagtgggaggagaagagacccagttcttggagttggatcaccaaaacaattccaatccatcctcaggcaaaatgaggcctgtatcaggagtgttgctgggggcggtcgggggagctggagccacagccctggtcttcctctccttctgtgtcatcttcattgtgtgagcactgaccctagggagggagggagagtcctgggggagggcggactgggagcaggatccctgaagccagagctggaagggactgcatgggtcaagagcttggggcaagaatgagctcacgggtgcgtggcaagaatttcaagagcgcccttgtctgtggggctccacatctgtggtgaaccttgggccccaccacccaggaggcaggagcctctgttttcaacactggggtctctgggactggaccaccctcctcccacctcagttacccctccagcgccccaacaggaaatacagggcaggggttggtctgcccactgcaccccgatctgaccacactgaaaggctctctggtctcttcactcagagtgaggtcctgcaggaagaaatcggcaaggccagcagcggacgtgggagacataggcatgaaggatgcaaacaccatcaggggctcagcctctcaggtgagtgatatgggcgtctccacacccagcatccagctgggacatctcccacaggatggcctccaggatttctctgcttatcatggccaaaattatctcctcatctcctcctccttcccaccatccagcttctcctgcaggattccccatcttgctgactgcatgacagtccctcctacctactttctctcgggccaggcatggaggaggagttatctcctctctgtcctccctttcttctctatagctccacattcaccaaatcttgtccatttttcctccctaagaatggctagcattgctcccacccccaccaatcctaaactctctcaatgctgaggcctgaggatctctgtcttggacttcctcacctccctgcctcttgtgtcccctgccctgatgggaggaatcattcagaagccatcactgatcagtttctttgcatctggacagctgttcccacccccaacactgtctagagcagaagccagaaaatactatctggaaaggccagataggaaatatttttggctttctggcctacacagtctcattgcagctcctcaactctactgatgtagcaggaaatcagccgtagaccatgtgtaaatgattagctggctgtgtgccagtaaaactttatttataaaaacaagctgtgggtagaatttgtcccaagggctctagtttgacaagccctaacctagagaaaaagcccaaacttcataactgcagccctgcacattctcgtctcttaaacatctacctctctagcagggctggaattagtgtgagatgagtgaggtcctggcctagcatgcaaaatttaagaaggtgccaaaaatctcagtaattgtgatagttttaaaaaaaactcttattttaggtttgggggtacatgtgcaggtttgttacatacataaactctggtcagaggggtttgtggtacagattattttgtcacccaggtcctaagcctagtaccccacagttatttttttctgttcctctctctcctcccaccctccaccttcaagtgggccccagtgtctgttgttctcttctttgtgttcatgagttctcatcatttagctctcactgataagtgagaacatgcagtatttggttttctgttcctgtgttcgtttgctaaggataatggcctccagctccatccatgttcccacaaaagacataatctcattcttttttatggctgcacagtattccatggtgtatttgtaccatattttctttatccattctgtcatggatgggcatttaggttaatttcatatatttgctattgtgaatagtactacaatgaacatttgcttgtatgtgtctttatggtagaatgatttttattactctgagtataaaaccagtaatgtgattgctatgtcaaatgatagttctgcttttagctcttcaggaaattaccatactgctttccacagtggttgaactaatttacactcctgccgacagtataagtgttcccttttctctgcagccttgccagcctctgtgattttttttactttttaaaagtagccattctgactggtgtgagatgatatttcattgtggttctgatttgcgtttctctagtgatcagcgataatgagctttttctcatatgtctgttggccaaaaatgtctgttcatgtcctttgctcactttttaatggggttgtttttctcttgtaaatttgtttaagttccttatagatgctggatattagacctttgcctaatgcatagtttgcaagtattttctcccattccggttgtttactctgttgatggtttattttgctgtgcaggagctcttaagtttaattagatcccatttgtcaatttttgcttttgttgtgattgctttggcatctttgtcaggaaatctttgcctgtttatccagaacgatattgcctacattgtcttccagagtttttatagttttgagttttacatttaagtttttaacccatctcgagttgatttttatatgtggtataaggaagcagtcccactcaatcttctgcatgtggctagacagttatcccagcaccatttattgaatcaggagtcctttccccattgcttttttttgtcagctttgttgaagatcaaattgttgtaggtgtgtggctttatttctgggctctctattccgttccattggtctatgtgtctgtttttgtaccactaccatgctgttttggttactgtagacttgtaatatagtttaaatttgggtaacgtgatgcctccaggttttctttttgcttaggattgccttggctatttgggcacttttttggtttcatatgaattttaaaattgttttttctagttctgtgaagaatctcattggtagtttgatagaaatagcattgaatgtataaatttctttgggcagtatggccattttaatgattttgattctttttatccatgagcatagtatgtttttccatttgtgtcacctttgatttatttgagcagtgttttgtaattctcattgtagagttctttcacctccctggttagctgtatttctaaaaattttattctttttgtggcaattgtgaatgggattgtgttcctaatgtgactcttggcttggtagttcctgatgtatagaaatactagtgatttttctatattgattttgtatcctgaaactttgctgaagttatttatcatttaagaagcttttgggctgggactacgaggttttctagatatagaatcatgcatctgcaaagagggatagtttaaattcctctcttcctatttggatgctctttatttctttctcttgcctgattgctctggccagaatttccaatactacgttaaacaggagtggtgagagagggcatccttgtcttgtgctggctttcaaggggaatgctttcagcttttccatattcaatatgatgttggctctgcgttcaccatagatagctcttattattttgagatatgttcctttaatacctagtttactgagagtttttaacacgaagcgatgctgaattttatcaaaagccttttctgcatctattgagataatcatgtgtttttgtctttagttctgtttgtgtggtgaatcacatttattgatttgtgtatgttgaaccaacatgaagccgacttgatcatattggattaaccttctgatgtgctgatggattcagtttgcaagtattttgttgaggatttttgcatcaatgttcatcaaggatattggcccgaagttttcttcttttgttgtgtcttcgccagattttggtatcaggatgatactggcctcatagaatgagttagggaagagtcagtcttcctccgtatttgggaatagtttcagtaggaacagaaggaggctcagatctgacatttattgtgtgattgaagagccttccaggcagagggaggagcaaagcaaggcccaggcacaggaagaggaaaggagaggagccatgggacatctgtgtgattagacagagggaggcaggactgagagcaggaaatgactttggaggagttgagcctatgtgaattgtgtctgactgcacaggctactgtgagcatttggagagttttgagcagaaggacatgatcagacgagattgggtccgttcagggtggtatagctgtagaccagaagaacatgatcaactttcattttcatgggattcctctggccactgtgtgcagaagagaccgtgtgtgtggcaggggaaggagagagcataggaggtagacaggaggctggtgaacatcccaggcagaaggtggtgttggctggaaccaagatagcagcagtggtagacatgactgtctcccagatgaattctgcagtggaacctactgggatttgttaatgaattggaattagaatgtgagccacagaaagggagcaagaattacttccagatttttgccctgagcagtgggaagaatggaggtgccaatcattgaggctgagaagattgcagaagaaatggatttgggaaagaaaaggaggagttcagattgaataggttgagttttgtgtgtctttggacaagaacgcgggggtttgaattataccactggatcaaagactatagtcaggagaaaggagtgggctgggggtacagatttgggagtcattagcctattgatggcatgaagccaacacagtggataagatcacaaggcaaaggtaaagaagaaaagaacccggggctgctctgatatttaaggtcagggagacctgaagcaattggcaaagaggttgccaagaaggtgaggtggacccagaaaagcatgatgtcctatagttgagtcaagaaggccttctgtgtagggaaggtgagcagctgggtcctctgctgctgaaaagtccaggaaggagaagactgcaaggtggacatttagactcagccacttaagtggtagtcacagtgaccttgatagtagcagtgcttagacttggtatgtgtgtgaatattaatttgagtaatcaagagagaatctggcaagcaaaatcactgacagttccatggagcatcttctgcacaggggagcagcagggaagggctgcgatgaaggaggaccctcccaggcagcctctgtcactctctgctgtgtgagtctgtattagtttcctgtggctgctgtgacaaattaccatgcatttcctggcttccaacaacacacatggattaaagttctgaaggtcacaaccccaaaatgggtgtcactgggccaaaatcaaggcattggcaggcagggctggttccttctggaggctccaggggaggatgcaatttctcaccctttctggcttctagaggcacctgcattccttggctcaagtcccttcctctgtttgcaaggcaagtagcctggcatcttccaatctctctaagccctcctcctttcacttgtaaggactcctgtcattccactgggcccacccaaataatccaggataacctccccatgtcaatatccttaacctagctccatctgtaaagtccctttagcaatgtaacgtaacagattcacaggtttcaggggattagggtatggacattttggggagcagttatacttcttatcagaggatataatttctttgactgagttgtcctccccataccaccgaactgtgagcttcctaagagcaggtgccccatccaaatcaaggccctgtaattctctctcacttagcctcttcctgcccatcttataattcacacatagatattcgtttgtttgacagtcatttttgccaaattccctcaattaaaaagtgagtttcaggaggtcagggccaacacctactgtgtccaccacagtccatccagcacccggatcagggcttcacacacagagggccccagcaggactccaggctttggggtcagaaggaagggactggattgggtcccggcataacagggagtttgggtacgctactttcttcatggagttgttgcgggaagttaataagattaataaacaccaaacaagttgctcaataagtgttaaatattgcaggaaagtataaatgaaggagatttctataaaatgaacgtgggatagaggcaggaactcatgaagtttaattctatacagaggaatatatccgaaccaaccaaccgatcaaacaacttgtgactctccctgccttatcctatttccactgctctgctctgactctcttctctctctccattcagggtaacctgactgagtcctgggcagatgataacccccgacaccatggcctggctgcccactcctcaggggaggaaagagagatccagtatgcacccctcagctttcataagggggagcctcaggacctatcaggacaagaagccaccaacaatgagtactcagagatcaagatccccaagtaagaaaatgcagaggctcgggcttgtttgagggttcacgacccctccagcaaaggagtctgaggctgattccagtagaattagcagccctcaatgctgtgcaacaagacatcagaacttattcctcttgtctaactgaaaatgcatgcctgatgaccaaactctccctttccccatccaatcggtccacactccccgccctggcctctggtacccaccattctcctctgtacttctctaaggatgactactttagattccgaatatagtgagattgtaacgtg

SEQ ID NO: 24 - DNA, 16141 bp, Homo sapiens
tagggcctcctctaagtcttgagcccgcagttcctgagagaagaaccctgaggaacagacgttccctcgcggccctggcacctctaaccccagacatgctgctgctgctgctgcccctgctctgggggagggagagggcggaaggacagacaagtaaactgctgacgatgcagagttccgtgacggtgcaggaaggcctgtgtgtccatgtgccctgctccttctcctacccctcgcatggctggatttaccctggcccagtagttcatggctactggttccgggaaggggccaatacagaccaggatgctccagtggccacaaacaacccagctcgggcagtgtgggaggagactcgggaccgattccacctccttggggacccacataccaagaattgcaccctgagcatcagagatgccagaagaagtgatgcggggagatacttctttcgtatggagaaaggaagtataaaatggaattataaacatcaccggctctctgtgaatgtgacaggtaaggcacaggctccaggaaaggccacagggaaaggtcatgggggcggcagggaaaggctgggatggagcccctgccccaggagagggcttagggtgaagcgagttggctcagggcaggagctggaccagagcctgagctccccccagggctgcaccatggatcctctgacctgatcctgagtccccctctcttcaccagccttgacccacaggcccaacatcctcatcccaggcaccctggagtccggctgcccccagaatctgacctgctctgtgccctgggcctgtgagcaggggacaccccctatgatctcctggatagggacctccgtgtcccccctggacccctccaccacccgctcctcggtgctcaccctcatcccacagccccaggaccatggcaccagcctcacctgtcaggtgaccttccctggggccagcgtgaccacgaacaagaccgtccatctcaacgtgtcctgtgagtgctgggccgggacgcctgggtccctgatggggtgagcgtcaagcctggacactgggtgctgggtcccggaatctgggctggtggtggggtcaggaggacactggctctgccttccctgtttatgcggctcctggggacagacagggccagtgtccccagccctcacagtgatgcgggtctccatgtctttctgtcccagacccgcctcagaacttgaccatgactgtcttccaaggagacggcacaggtaggatggagctccctccctggggctggaggagcagggccttcaggtcaggatggggctggcttattcctcaacctggactcactttggcaaacagggatgtccttgtgggtgaactcagggcccctctgtatccttaggccccaaggccacttgttcccatcctcccatcacctcccttggactcccccacacacccccccctcagcctcaaacaagaagagggtggcattcacacagcaggaccaggctttgaggctccttctcatgtatctcctgaatacatctccacccttatctgtttatttctgatagttctgatctaagtacttctggacaggtgataaatgtccatgggcaaaaattcaaattgcagagcaaaggctctcctccgatgcctgcccccctccccagaaccaaccactgtccatccaggctgccctgagtctcggtttgtacacctggaggatctcagaggtggtttgacgtccgtagtgagactgtccgcaccctcctctagggctgtgtgtgagtccactgcatggatggactctgattttgtggcatctcctaatggaagatcacggcactaatttcatcctacggcaggatagaacaatcttgtatctacttccacaggaatatctaagcctgtgggttaagttcctaaaagcaaaatgtagctacattatatgttctttcttattttgaaagataagcccaaactgttctcgatgaagcggggagaagtttacattcccagcagtgagtggtgaaagtgtgtgtttccagaacttcagtctatgtctgtgtgtcagttgctgtcatcagtctctttctgtatccttcctttttctccagatctatgtatctctctgaccctctgtctctttttctacagtatccacagtcttgggaaatggctcatctctgtcactcccagagggccagtctctgcgcctggtctgtgcagttgatgcagttgacagcaatccccctgccaggctgagcctgagctggagaggcctgaccctgtgcccctcacagccctcaaacccgggggtgctggagctgccttgggtgcacctgagggatgcagctgaattcacctgcagagctcagaaccctctcggctctcagcaggtctacctgaacgtctccctgcagagtgagtgcaccagtatgctggggaggggctggagaggagaacacacctcctccacccttagtaactgctgagcgtggaccttcagagaggagctccgctctggtctgtgctcagctgtgaggtctggaacttccctgggacccacagcaccactgtcctcttcctgccagggaagggttgtggggtggggagagggcaggagtggatctcagaggggacaggatggggccggacaggtgtgtttagggagacaagcgcctttctttgcagggctgaactggagtcacacaactgagatacttgctttgagcatcaaattaaaaaaaagaaaaagcccagcaagtcagcaatcaaatgaaatcatattgcaatgcaataatcttttaaaaaaagtaaaaattgaatgcaaaacaaattcattaatggataaaatattaaaattgtgaaaaaaaaccccaaaaggaatggctggcacttgcacgcctcactggcctcaggaagagtctctccatgtcctgctctctctcattcctgttctttgtgtctggaaaggggaagtggaaatagaagtctaggaccctacaggaagtgggaggagaagagacccaattctctatgatatatcacaaaaataactcccatctgtcaacaggcaaagccacatcaggagtgactcagggggtggtcgggggagctggagccacagccctggtcttcctgtccttctgcgtcatcttcgttgtgtaagcatggaccctagagagggagggagggagagccctgggggaggacaggctggaagctggatccctgaagccagagctggagggacctggatgggtcaagagcttggggcaagaaggaggtcacaggtgcatggtgagaattccatgtgggcctgtgtttgaggagctttgagtctgtggcaaaccttggtacccactgtccaggagaagagagcctctgttctcaaccttggggtctctaagactggaccactgctttcccacctcagtcacccctgcagtcccttaataggaaacacatgggggtacctggtctgcccaccgcaccccaatctgaccacactgaaaggctctctggtctcttcactcagagtgaggtcctgcaggaagaaatcggcaaggccagcagcgggcgtgggagatacgggcatagaggatgcaaacgctgtcaggggttcagcctctcaggtgagtgatgtggactctccacagccagcatgtagcctggacacctcccacaggatgacccccaggactaatcagctgggcgtagccaaagttacctcctctctgttcttcctttcttctctgtagccccaaatcacaatgtttggttggtttcctcccctaagaacagcttttattgtctctgctccctatcctgacccttcattgctgaggcctgaggatctctgtcttttgttccctcacctgtctgcctgtctcctctcctttcctgcctggggggactgtccagaagacatcatcgtccagttcctctgcatttgaacagctgttcccccacccctcaataccgtttagagcagaagccagcaaatactatctgtcagggacagatagaaactattttcggcttcatgggccacacagtctcattgcagctcctcaaatctgctgttgtagcaagaaagaagccatataccctgtgtaaacaaatgaatatggctgtgtgccaataaaactattcacaaacataaagagtgggctggatatgactcagatactgtagtttgacaacccctgatctagagtaaaaatcccaaactctatagcctgcagcagtgcacattctgactttttttgtttttttttttttttgttgttgttgtttttgagacagagtcttgctctgtcgcccaggctggagtgcagtggtgcgatctctgctcactgcaacttccaccttccgggttcaagccattctcctgcctcagcctccggagtagctgggactacaggcgcctgccaccacgcccagctaatttttttgtatttttagtagagacggggtttcactgtgttagccaggatggtctcagtctcctgaccttgtgatctgcccaccttggcttcccgaagtgctgggattacaggcgtgagccactgtgaccggccacattctgaccttttaagcacctacctctccactagggcaagaacaagggtgaagtgagtgaggctgttgcctcaagtgcattttttcgtttgtttgtttttgttttttgagatggagtctcgctctgtcacccaggatgtagtgcagtggcacaatcttggcttactgcaacctctgcctcctaggttcaagcgattctcctgcctcagcctcctgagtagctgggattaaaggtgcacaccaccacacctggctaattttgtatttttagtagagacagggtttcaccatgttggccaggctggtctcaaactcctgacctcaggtgatccgcctacctcagcctcctgaagagctgggattacagatgtgagccaccgcgccccatcctcactgtctgctctgactcacttctctctcccatgtctcaggggcccctgactgaaccttgggcagaagacagtcccccagaccagcctcccccagcttctgcccgctcctcagtgggggaaggagagctccagtatgcatccctcagcttccagatggtgaagccttgggactcgcggggacaggaggccactgacaccgagtactcggagatcaagatccacagatgagaaactgcagagactcaccctgattgagggatcacagcccctccaggcaagggagaagtcagaggctgattcttgtagaattaacagccctcaacgtgatgagctatgataacactatgaattatgtgcagagtgaaaagcacacaggctttagagtcaaagtatctcaaacctgaatccacactgtgccctcccttttatttttttaactaaaagacagacaaattcctacctctctgtaccttggtttcctgctctgtaaaacaggaatgagaagccctacttgcaaggttgtggtcaccattccaggagtcacatcccgttagagctcctggcacaggtgtatgccgagcactgatggatcgctgtgctttgaacacaaaggtcctgctgggaacctctcctgattctggtggcaactagtacttatatgtctgtgtcacttgcctgcaaaatagcgattctgcaactttccaggaaataacctcagcctgcaaatcaggtctaggtagcatctggatcctgcccacctcttcagcctcatctgcccaccctgtgactgctaggccgccttactctctgcagtctacgtattgtgcacagtccagtgggaatctttaggacacactgagctctctccgcactgctcacagcccatccatggctcctggatcctgaacctcccatcacatcctcttcgtgacatcactctcccacttcagtccactcctccatcttcaccacttaacccactggtccctctggtcttttccaaatcatttgcaacatgccctgttggttcatacctcagtccttgcacactggggaccctcctcctagaacgccctcctcctgggccttcttctgtctctgtctttgaaaatggagttcaaggattggacttctgggttgagctgagggagagagtgaagcagcagctcatgatctccctcctctaaagccaaacccagggaatgagaaacgtttccaaaggggcacaggatcatctggcaaattaaacaacatgatccaaaaaaatttacctacatgcagcacccgaacgaggaaagggacatctcacaacaatcactttatgcagtagccctgataggaagaaatcaaaggactggaggaagcactaaaacttccctaaatctagactcttgcccatttacggcagcatcaaaaaaccgtaaagtaccaaggaacaattttttaaaaatcatggccgggcacagtgtctcacgcctgtaattccagcactttgggaggccgaggtgggcagatcacgaggtcaggagatcgagaccatcctggctaacatggtgaaaccctgtctctactaaaaatacaaaaattagccgggcgtggtggcgggtgcctgtagtcccagctactcgggaggctgaggcaggagaatggcgtgaacccgggtggtggagcttgcagtgagctgagatcgtgccactgcactccagcctgggagacagagcgagactccgtctcaaaaaaaataaataaataaataaataaataagtaaaaaatcatatccgagctgggcgtggtggctcacgcctgtcatcccaacactttgggaggctgaggagggcaaatcacttcaggtcaggggttcaagaccagcctggccaacatggtgaaaccccatgtctactaaaaatacaaaaattagccaggcgaggtggcgtatgcctgtagtccttgctacttgggaggctgaggcaggagaattgcttgaacccgggaggcggaggttgcagtgagctgagattgtgccattgcactctagcctgggcgacagagcaagagtctgtgtcaaaaaaaaaaaaaaaaaatcctatgctatggtttggatatggtttgtttggccctgccaagcctcctgttgatatttgatgcccagtgttggcggtggggccaaatgggaggtgttcaggtcccgggattggatccctcatgaatggcttggtgctgtcttcaaggtaatgagagagttctcactctgttacttcctgtgagagtttctccaagagctgggtgttaaaaagacattggcacctcccctccccagcccgtgcttcctctcttgccgtattgtctgcacatgcagacttccttttgccttccaccatgagtggaagcttcctgagaccctcaccagaagcaaaggctggtgccaagcattttctatgtggtgcagaactgtgagccaaataaactgtggggggtgcacggcaacatattcaagcttatgtacaaggcatttgaggtcgaggcatggaaaaatactgaggcaccgtgtgcgtgttgtttgtgcatgagattgaaactccttgaccctgaaaacagggcaaggaacggaatgtgtgataaggagcgcggaaagcagcctcctgagactgtagtctgagtgtttttaccaggccatatgtgtctcatgacccgaccgcaaaaggccatctggtggacattttggtttaacaaaccctttcgagaaacacttggcggacggattctggggcggcactctttcagagatgctgctgccgccgcatcccgctcagctggaattgtctgagtgcttcattcttggcgttcactgcagctacaagctgtataaacctcttttctttataaattacccagcctcagatattactctatagcaacacaaatgaactaagataacacggaatgcttctgtactgatgaatatagaacatttttgagagacttaaggaaggcccaaatgaaggaagaaatatatcacgttcatggattagaaggcaaaaatggttaaaatgtcagttgtctgcatattgatttaggtaatccctgtcaaaattcctatatatatataaaatatatgtatatgtgtatatgtatgtacataagtatagatgagtgtatatgtatgtatattgtaaatataagtttatatatatacatatatagttataaattgataagttggttctgaaatttatataaacacataaaaacctagaataaccaaatcattgtgataagaaacacatttagagaaggcagactttaacactagagtaatacagagagtgtggtgtggactagagtacagtctacaaatggacccacacatatacagtcaactgaatagcatcaagtctattcaattgggacaggaaagacttttaataaatgttggtaggtggtcgggcgcggtggctcacacctgtaatcccagcactttgggaggctgaggtgggtggatcacttgaggtcaggagttcaagaccagcctggataacatggtgaaacaccatctctaccaaaaatacaaaaaaaaaaaaaaaaaattagctgggtgtggtggcaggcaactgtaatcccaggtactagggaggctgaagcagaattgcttgaacccaggaggcagaggttgcagtgagccaagattgtgccactgtactccagcctggcgacagagtgagaccccatcttgaaaataaataaataaataaaaaataaatgttagcggaacaagtgaaattagggttggtaaaaacgagtgttgagctgtttctcacatcacacgcaaaaaattagcctgaagcgaatcataaacctaaaagtaaaagcggagactataatgtttgtacaactgtgctgtttgatatggtaaccactagccacatgtggctactgagcacttgaaatgtcctacatttagtgagaaaataatataaaaatctaagtaattaatatttaaaattgattacatgtttccatgtaacggcataatactcatcaatatataataacaatatataatacatgcaatagcttgaataaattttgaaaacatcttgagtcaaagaagccagatgcaaaagaatacatgctctgtagtttcacttatatgaagttcaagaacaggccaaactaatctacaaagacagaaattcataacagtgactgcctcaggttgggagtgggatttggggattaacgtgaatggcacacaggggaactttctggggtcctgggaattttatttctttcttttctttttttttttttttttttttttttttgagaaggagtctagctctgttgccgggctggagtgcagtggctcactgcaacctccgcctccagggttcaagcgattctcctgcctcagcctcctgagtagctgggattacaggcacgggccaccatgcccagctaatttttgtatttttaatagagatgaccaccatgttggccaagaccaccatgttggccaggatggtcttgatctcttgaccctgtgatccaaccacctctgcatcccaaagtgctgggattacaggcgtgagccactgcgcccagccagtcctaggaatagtctatgtcttaactgggatagtaattatgtggttatgaatcaaaacacattgaatcacgcaaataaaatctatgtattttactgtatgtaaatttacctttcatgaaagagaaattaaaaactcttaaatgatgaaagcttttggttccctcttttttattagactagctagtgatctatcaatcttatttgttctttcaaagaaccaactttggggtatactgatcttttgtaggaattttcgtatctcaattttattcatttcagctctgattttggttatttgttttattctgctagctttggggttgacttgctcttgtttttctaattcctctaggtgtaatgttaagttgctaatttgggatctttctaactttttgatatgggtattctggtacattgcatctttactttcctggatgctaggaccaaactggactagagtaaattacgtggttccttctgtcccaaagaaagatgtatttttaactcaggagctacatcagccccatctggctacattaagcatcccagtctcctctgcgtctcatgctggactctatgcaaaagggacagccagcgaaagcattattgatatgtcaatattgagatgtgagaatttgatcctgtcattatgttgttagctggttgttatgtagacgtgattgtatagttgcttcataatgtcagtgggttatacacttaaccacttaacaccactttctgtggtgtcatgtaacattctttcacttctgtgtttggcactcacttaaggacctcttataagtcaggtccggtggtaatgaatttttttcagtttttgtttgtctgaaagggattttatttatccttcgtttatgaagcttagtttggcagggtatgaaaatcttggctgaaatttgttttctttaagaatgctgaatataggccccgaatgtctttggcttatatgatttctgctaaaagctcttctgttagcctgatggggttccctttgtacatgacctgcctcttccttttagctgcattgaatattttttctttcatgtgaaccttagaaaatctaatgactctgtgtctgggggatggtaatcttgtacagtatcttcctggggttctctgaatttcctgaatttatatgtcaacctctctagcaaggttggggaaatttttgtggatgatatcctcaaatatgttttataagttgctgcgtctctctttttccaggattccagtgggccgtaggtttggtctctttatataatcccatatttgttggagggttttgtcattttttttaattctttttttaaaaatttttgtctgattgggttgattcagagaactggtctttgagctctgagattcttttctcagcttaatctattctgatgttaatacttccgcttgtattatgaaatttttgcagtttttcagctctaacagatcagtttgattctctcttaaaatgattattttatctttcagatcttgaatcattttattggatttcctacattccttggactgggtttcgagtttctcctgaatctccgtgatctttgttgccatccagattctgaattctatgtctatcatttcagtcatttcagactcattaagaacattgctggggagatagtgtggtcacttgaaggtaaaatactctggcttttggatgtgtcagatttctttcactggttcttcctcatctgtgtgggctgatgttcctttaatctttgaagttgctgttctttggatagggctctttgcttttatattctctgatgcccttgagggtttcacagtggtataacttgggcttagacaactgcatttgtttctggatgatttcaaggggcccaggctcaactcagcactcctgagctgcatgctctaactacagggacctgggacctggcccatggcttttttttttttttttcctggcccttcaaggttaagcacctcctatgctggaatggccaaggtgttccgggtccactggcaacaacgctccaataggggttgctgacaaagcattttggcagggtggccatgggtgatgggagttcctgcacgtggtgtgcatcagctgcagggtggccgtgggtcttgcaaatctgcttgctaatgttatgcctaagatcacgttataaaagactaacttgtgcctcattctctctctcgctgtctcttgctttctcactttgatgaagctggaggccatgttgtgagctacctatggaaaagcccatggtttcataacaaagctgattgagtagcaaatgttattttccaggcaaaaaaattaagtggtaagttcttctgaatatgcaaggcagaaataattccagtgtttcataaactctttcaagtatgaaagacatatcagccggggtgactctggggagttttttgctttctctgttcctcactgagatctacatggaagggaagggaaaaacactcgtctctaaaaacctcccacctctggcacccataagtctgaagttgcacttatgtgaggaactaccactttgcccctacccactggcttcctgttggggttactcttgtttttccaagccagttcttcccacgccgagggaacttatgatgagacagccccaggaaagtgcctgacacgtattccctgggctgccccttcccttccacatgcttcctgagtgagcacgtccaccttgtggctcagctgtgagccctgccctgatgtctcccccactttctgccccttgagcctcttcttggacatggtgcctccatcccccacccccgactcttcagttatcccagtcaggacccaggacttattccagttgcctcctgttttcaaccaccccatgcatgagtcaggggttcctgtaaacttcacttccccaaaaatgtctgccatcatgcccttcctcctccctccattccctgtctcctcccctctatctgcatggccaggcccttttcggtcttgacgattgctccatttcccacccaacatcccggtctgcagcctctcgcctccatgctgtggccctcgcagcacaagccctgaaaaattttcctgcatccagagctgacactgcctcttccctgctcagggccctctctggttccctggaaccctcagtccaagctgttcagctgatcatgtcccagcacctccaatttccccctggaagaccccacacatatttgcagggcccttcatctgcccggctgtctcatggcctgtgctttttcccctccacctgaggtgcccttagccacctgttaatatgaccaactcccccactagtctcagctcagcctctttccctgcggggtctttcagctttttgaactcctggatttgcattcgtgagtatgtgtcacacagtcaggtgtctcctctttctgtttttgtggggttgtgggagagacagcctctcagctccaccctccccgctctcactgttttcctcactcaaccctgaagaccctgagcaatggcacctcgcttcctgtcctggagggtcagtccctgggcctggtctgtgtgactgacagcaactcccccgcctcactgagctggtctcaggagggaagaacactgaatctctcccagctctcagcaactgggatcctggagctgccccagaaagggactggaggtgaaggcgacctcacctgtgaggctcagcacccactgggctcccagcacatttccctgagcctctctgtgcagagggagctgctggacgggtgctggggcaggcagcctggtcaggtgttgggctgtgagaggggcctagacctaggaacaaaacctcaccctcttctccccactcccaggaagtccctctgggtgcagatgtgcgagtgaagatcaggagggctcccagcccctggttctcacctaatcaaggggcgctcatgggcactggtttttccttcacccgtggcctcacctggggctactactccaggtgagcagggctgctcttttctagggaagccgagggattggcccccgagttccagatggggctgagctgtcctgtcccgcctgagttagaattgaagtggccgatgctaatctgaggccggtgttggctctacaggtgtggaggcccccaggggagcagggctgagaggcctgactgagcccctcctgctcaagacagaactcagatgaggacacccagccctgcgggacagatgcaggacatcactgtcagccatggctcagcccttctgaccactgagatgctgcaacttcccctcctgggagggagcgattgggcaaacacttaccctttgctggaaatctcaaggcacagcacgggtgctcacaatctgaatacagaacgaatgaatgaatgaatgaatgaatgaatgaaatgtctttccttatctcatgtgagagacttgacagttctttcactctccaagtaacatcagcttcccctgtcccagcccagtctgtcctgggcagacaagattaattaagtggctcctgggcagacattggtgcaggagacagggcccaggagacctgtgtgatttgggcaattcgctttctatctctgtccattcatgctgctacaacaaaataccataaactggccagtttataaacaacagaaattcatttctcacagttctggaggctgagaagtccaagaccaaggtgccagcaggtttggtgtctggagacagtttgcttcctcatagatggtgccttttccttatgttctcatgtggtggaagggctgtgcaaattcccctgggtctctcagatgaggggactaatcccattagactaatcccagagtcctcatagcctaatcgcctcccaaatcattataccttctaatactatcacatggggattcaaatttcaacaaatgaattttgaggtgacatattcagaccatagcacttgtcactgtggaccttgatgtcttcctctccgaactgtggaagtgggagtagagggcttgtcagctcccctgggtcatatgtggttcacaagttcctcctttctacagattctgtggcttccttaagtctctccttcccatttttttttctgattttaattgcaaactggggactgtgggaaagagatgggccatggtctagcccttctgaggcaggaggagcatagaccaatggggcaggagcatagcaaagagaattaaaagttggataaagggcagaataagtaaaagcagagagcagaagcaaggtgaggggacgggtgagcaagaagcaagaggcagaagttgagcagccaaaacaaaaagtaagatagagaagtgagcaaggacacccgtggccagcaggatctggaccaaaccagtaaggggcagttcttcagagctatgcatgtgcattagagagaaaaagtatccttaacatgaccctgtatgataatcagctcattaaagttcatgcatatggactgcatattatccatgtacttaaaattatgggatgggtcaaagtaactaagcaacatacttaaccatcaaaaaggcaggcactggccaggcgcggtggctcacgcctgtaatcccagcactttgggaggccaaggtgggcggatcacttgaggtcaggaattcaggaccagcctggccaacctggtgaaaccccatctctactaaaaatacaaaaattagccaggcatggtggcgggcgcctgtagtcccagctaccagggaggcagaggcagaagaatcgcttcaacccaaaaggttgaggttgcagtgagccaagattgtgccactgcactcaagcttgggtgacttcgtccccacctcaccaccaccccttccccccgaaaaaaggcagacactggatagagatttggcagccttgggaagcgaagaaaaacaaaaaaacaaacaaacaaacataaaaagacccaaagtaatgctgatctcacctcatagagatcagttcgctctccctctccaagagtgtgatactgtgcttaataaactgctgcttcttgctttgctgtctgtgtgtgtctcatccaattctttgtttaagacaccaagagcctggaactgcatggcaccatccggtaacacttctgcccactgagatactgcaaatatccttatggggagagagtggctgggcaaggaggaggcgcccaggaggcagattggtctgcaggatgagatactagctgcaaatgcagggattggaggtgagggcggggagtggcttcggacgcccaaacccagcatcttcctctctcaatcgttacagccaaatgatctctaggttatggacaattaggggacagtgtgggctgagcagatcaatgcagttgtatggaagaaaacagactgggattttctatgtatacaacatcttcaggaaaacctacgtgaagttagaattttcaaggcagcatgtgccgatgataaaactacatagaacagcaggaagactattatcattaaagtgaggctaggggctccttcaggagggagcgggggcatggccaataggaaaggggaatgtaagg

SEQ ID NO: 25 - DNA, 49055 bp, Homo sapiens
acttggacgcgcttgcggaggattgcgttgacgagactcttatttattgtcaccaacctgtggtggaatttgcagttgcacattggatctgattcgccccgccccgaatgacgcctgcccggaggcagtgaaagtacagccgcgccgccccaagtcagcctggacacataaatcagcacgcggccggagaaccccgcaatctctgcgcccacaaaatacaccgacgatgcccgatctactttaagggctgaaacccacgggcctgagagactataagagcgttccctaccgccatggaacaacggggacagaacgccccggccgcttcgggggcccggaaaaggcacggcccaggacccagggaggcgcggggagccaggcctgggccccgggtccccaagacccttgtgctcgttgtcgccgcggtcctgctgttggtgagtccccgccgcggtccctggctggggaagagcgtgcctggcgcctggagagggcagggagagagggggacacggcgggggtgcgtggcccgggtcgcctgcggccgggcatgtccgggcaagacgcaccagtcgtcggagtcgggggaagagatgggtccccgggttgggcaggagcgacctgggccgccagggaacagagcgcgcgctccacttggtgtaaattcccgaatccagtgggggagggcgacaaggagggaattcccgagtaagctgcgtgaagccacggagaggtcgtcggactttgattttgttttctttccttactttctgtttctttctctttttctctttcttcctttctttccctcccttccttcctcgctcagttcctgccttaatttctttttcttttgcgccttcgaatgaattcctaaaggcgctcattgcagatcgctttgaacctgcggccggcgaagaactcccctgtggtcgctgcggcccagtggttccgttccgtgcgcgggagtcgtcgcgggcgcagctggagaggccccttcccctccttagcggctgcgcccctacgcgtgcggggccgctcatcgccaatgccattgtttggggttccttgggaaaacgagatttaggagaagggagttgtggcacttggggcctgacctgcttgataatagcagctgcattttggcctgggaagagcctttcttgccacctcttggcaagtatccgtgataatggggaagggacaaagagtcggctttgtagggaacagcatggtgtgctcagcgcctggaactgcgcttggggccaggagaggttctgaatcatcacattttacagaggaagagaccgcagctcagagtggggaagtgtgtgggcctagacctaactcaagactgtacagaggggctggaagggagaggaggaacagtgaaaggaaggtcaagagaatgctggtgttgacctagaagaatgtcagtgtgaagcattggagtttcatgggatattgttacacacctcatgttttcactgtttccgccccacaccacagtatgtccttggtctcacctctgagtggagggaggacctaactgtcctagtgaggagagtgtacaggggcctctgcctccccctcctgctgtggtttctgtgggcctaggtccccagggcatcttgcctctctttgggtggtggatctttggtctctggctgcttttaaagatttttcttagcactggtttgcagtgatttggtttgtttgctctgttgtggggttttttttttatctctataaagaattttttggatttttggctttagactttcatgttctttctacttggaagatttttctgtaaagaaagccacaactgggttgtgttgaatttcttggatttggggttttagagtttatgttctccttggagacttttctgtaaagaaagccacaacagccgggtctggtagctcatgcctgtaatcccagcactttgggaggccgaggcgggcagatcacatgaggtcagggattcgagaccagcctgaccaacatggtgaaaccccgtctctactaaaaatacaaaattagctgggtgtggtggtgggcacctgcaatcccagctacttgggaggttgaggcaggagaatcacttgaacctgggaggcagaagttgcagtgagcagagatggcgccactgcactccagcctgggagacaagagcaagactccaactcaaaaaaaagaaagaaagaaagccacaacagagttatgttgaatttcttggatttggggttttagagtttatgtttttgtttgtttgtttgtttgttttgagatggagtcttgcctctgtcgcctaggctggagtgcagtggtgggatctcagctcactgcaacctctgcctcctgggttcacgccattctcctgcctcagcatcccgtgtagctgggactacaggcatgcaccaccacgcccagcgaactttttgtatttttagtagagacggggtttcaccgtgttagccaggatggtctggctcgtgatctgcccgcctcagcctcccaaaatgctgggattacaggggtgagccaccacgcccagccgagtttatgttctacttggaagattttcagccattatttcttcaaatactctgtctcttctggtgactgagatcttattatatttacgttagaatgttagattttgtatcagagctaacttagtatctgttcttttttttcccccatcattttctatgtttcactttggacatttccctgtgagggctcttcaagttcattgatctgcttctgcagaatctaacctgctgttaatctcatctactgtatatcagatatatattttttgaactttagaagttctcttttggcatttttaatatcttccatctatttcctggtcatctttgtgtttttcttttttgagacagggtcttactctgtcacccaggctggagtgcagtggcacagtcagagttcactgcagcctcaacctcttgggctcaagtgatcctcccacctcggcctcccaagtagctgggaccacaggcacttgcaaccacacctggctaatttttgtatttttagtagagacggggtttcaccatgttgcccaggctggtctcaaactcctgcgctcaaggaatcctcccaccttgtcctcccaaagtattgggattacaggcctgagccaccgtgcgcaacctatgattttggtggtggtgttttttgtttttctgttttttaaatattcttgagtatatttgtaagctttagatgacctgttttaagttatttaatctatcaacaccattatatctgttattacggccactgtttctgttgattacattttttttcctgcccatagggactttttttttcatgcatagtaatttcttattgcttgacattgtgaattttgctttcttgggtaccgaacatcactgtgttctttcaaagtctattgggcattattctggtcacagaaaactgaggatcagtttgctcctctgatactagcttttatctacatataactatataccttgtgttcagttgccttattcaggggctcatttagttaactactaaagttatagtggttgacttctgatggtaactcgccagcaccctggcatgcgttctgtccactgtgggaaggggaacatgcagatctcccagccctgagtggtccacaatctagtctctccttccctgggtggcttcttctcaggcacctagagtcagtctcagcagacactggacatgtcttctgcaaggatccagagtcctccaggcagctgcttctcccagtctctgccctgcacttggcctctgggagttcctgcctgtggttctcaacagagactacagagctctacagggtcctctgcccctgctgtagctggaggctgtccttacgcagtgagctgaggccacagctagtctcactgcatgtgcttggcggcggggacaggagtgattcattcatcaggtagaggaggaaccctttactctgggaaaatctgtgcctgggttggggaaggacaaatgagccctgtgtgaatactgactactccctggagcccacagtctggtggagcaggtgacagcagggacctaaataactatcaggaagcatgaggtcccaccactgtcacctcccccacctccagagtggctgtgctggctccagagatgtcatccctccatatttgactgacagagggaggctgtgcagtcccaaggctccaggtcatggtagtttggccaggataatatggtttgcttaaaatcaacattgagggtaatgatcgtactaatcagagcatgtgtttaaagttctgtgttttaagcactttccatacatattaacactttcagttcacacaacaacctatgcaggaactgtgattatcctgggcagttttaaggatgtgggtgactcagagaggaaagaagaggttactcgggttaatttttgacgagaaatattagcaggttttatgctcaaacttggtgtaaagcaaggagcctgaatcacaggtgggtgagtcacaagacagggaaaccccgccaatggctcatgtccgggaggaggcagggtccctagaattcaatgggacaagaactgaaataagccaaacccctgacctcccttcttcttgttttccttctctctcttaaccatgcccatggacacccccatgagcccatttctgtggcccaacacagctgtgcatctctggccacacgcccattctccctcaatcagagaggcccacggacggcacagcctcgtcctgcacagcagaaagagtgaatggtgatgaatggatctatattatttcaactctcctacattttgtaatcatattacaatattaattcagcagtacctctcttgtttttactcccctcccccattacactggattcctgtctgtctgggattctgtctgtgtgcactctttcctctatgtccactactgtccctgccaccgatggcatttgtcacctctgcctgggcagcccctccagactctttgcaagttcatggactttggggttaatgatggctgtgcctcagctcctgtgaatggaaactgtgctaaggaaaggaagggccgtgccatgttcccgatactccacggctccttgcatatgcggtcgccaggcgcctacatgccttccatgaatgaatgaatgagtaacgtggattctaggaagctgcactaacccagacgttgtgtcctcagcctgctcatagagtgtgttaaacgtgagaggtggggagtgtggcaggcaggctgaggacagaacagaggatctgaatagagtacggaggatcacccaagtccagagtcaccaaggccattgtcaagttttccccggggacatccctcatcagatccacccattaaagatcattgttcacccagtggagagtggactaggtgggtgcactcaggtgtggcctggacagcattcgggatgggtcctagtggttagggtgagggtcaggttgcattatcgtgaaggaggcaagtggcagctgaggcagatctgagggaaatgatgataacgcaggccggtgatgcaatgggtttggtaagaagaggaaagaggtttgtggtggattctagtgtttctaatctgagacttgggtgaggtcattaccaaataagaaagagtaaatgggcataaatggctttaagaattaggaacctgaatgtgctattggagacagtatgggcacgtcattgctcatagacctgcagtacacaaaatgctaaaagatttcaatctgaatagagatgaaatgaaatggaaacatggatttttttttttttttttgagacagtttcactgttgctgcccaggctggagtgcaatggcgcaatctcggctcactgcaacctctgcctcctgggttcaagcgattctcctgcctcagcctcctgaacagctgggattacaggcgcttgccaccacacccagctaatttttgtatttttagtagagaccgggtttcaccatgttggccaggccagtctcaaactactgacctcaggagatccaccgccttggcctcccaaagtgctgggattacaggcatgagccaccttgcctggctgggaacatggatcttaaggaaagaaggaagatcatcaggaatagaaatatgaatgcacatataaagaatgattatttcctcttaatttcttgaaaatattcactatcaagtaatataacactttgtagggtttgtaacatatgaacatgcctgagacaactatagcagaaagaatgagtagtggagatgaatcaatctgtattatttcaagtctcctacattttataatattaccatattaattctgccatacaactcagtaatgaaaaggaatggagtactgatgcatatgaaaatatgaccgaatttcaaaataattatgctgagttaaagaaaccagacagaaaagcatatatagtatctgattccatctatgatatttatagccagaaatggtttaattaaaaaagaagaaggatcttaaatcaacgagctaagtttacaaatgtaggaattagaaaaagaatgaaccaaacctagagttagcattataaaggaaataattattagaagagaaataaataaaacagagaatagaaaaacagtagaggccggatgtgatggctcacgcctataatcccagcactttgcgaggccaagacaggaggattgcttgaagccaggagtttgagaccagcctggatatggcaaaaccctgtctctacaaaaaatataaaaagcagcctggcccgggggagcacacctgtgatcccagttactcgggaggctgaggtgggaggatcacttgagccccggagatgtaggttgcagtgagccaagatcacatcactgcactccagcctgggcaacagagtgagactctgtctcaaagaaagaaagaaaaagaaaaaagaaaaaccatagagaaaatccacaaaaccaacattgattcttcaatactattaattaaactgacagaattcactagtgaattctaacaagcttttaatgaagagctaataccactacttctcaaactctttcaaaaacttgaagagaagggaacctttcttgactctttctgtaaggccagcattgctctgatacccaagcagataaagatattacaagaaaataaagctatatcccagtatccctaactgatgcaaaaatcttcaacaaaatactatcagagagaattcaacagtaccttagatggattatacaccatgaccaagttggatttatttccggaatgcaagaatgtttgaacaaatgaaaactgaacaatgtaatacattgcattaatagaatgaagggggaaaaagacacatgatcatctgagttgatacagggaaagcctctgataaaattcaaagccctttcatgatgaaaacacccagcaaactaagaatagaagaaaacttccacaacatcataaaagccatgtaagaaaaccccacagctaacatcatactcagtgttgaaagacggaaagcttttcctttaagattaagaacaacataaggatatctacccacctttgccactcagcatagtactggaagttctagccaaaacaggcaagaaaaagaaataagagcatctggactgtaaaggaaaaagtaaaataatctgtgttttcagatgatatgatcttactggtaaaaaatccaaaagatttcacaaaaaattaaactgccaaaaataaaataatattaaatttttaaaattttgaaatttattgttgttcagtaaaagacagtacagattgcaatctgggagatttcaaaccaagtggtaagaaacttgccttacagcaggtatagtacaggctataaaggaggatgtattttgacaatttcatgattgacttataaatttatattctttttaaaggcaatcagagctgtttaagctgatttttctatagctgcttgatttaacttcactgaaccatattatgtcatgatgaaggtgtaaaacttatattttgtgggattttttatgattatagctaatgtttcagggatatcaggatgtcttaagttttggctacatggttatgggtaattgccgtggggtatatctaaactgtgtttttaatttttatttagtagtactaaaatgaattcatcaaagaagcggaatacaaaatcaactggaaaagtcaattgcatttctatacactaccaatgaacaattcaaaaaaagaaattaggaaaaaatccatttacaatagtatcaaaaataataaaataggagtaaactcaccaaggaggtggaagactagtacaatgaaaactataaaacattactgaaagtaattaaagaatacaaaaataaatggaaagatatgccatgattatgaattataagactaattatgtcaacatttcctaaagtgatctatacattcaatgtaatctctatcaaaatcccaaggacatttttgcagaaatgaaaaaatgtatcctaaaattcatatggaatttctagggaccagaatatccaaaacaatcttgaaaatgaataaaaatgtagtaggattcacacttcctgattttcaaaacttcctacaaagctgcagtaatcaaaacaggatggtactgacataaaagcagataaatcgatcagtggaatagaatagaggagccagaaataaacactcacatatatggccaaattatttttcacaaggatgccaagactgttgaatggaggaaagggccgtcttttcaatgaagggggctaggagaaccggatatccacattcaaaagaatgaagtgaaccttagcctaacattgtatttaaaaaatagctaaaaacaaataaaagatgtaaatgtaagtgctaaagctatagaactcttgaaagaaaatataggataaaaattctgtgacattggatttggcaataatttcttggatgtgacaccatggacataggcaacaaaagaaaaaataaacattttggacttcttgaaaatcagtaactcttgtgaatcaaaagatactattaactggataaaaaggcaaaacccacagaatgagagaaaatattttaagttatatatctgataagggcttaatatctaaaatatataaagaattcctacgatctaacaaaacaaaaacaacccagttaaaaatgggcaactgatttttataaacatttctccaaagcaaatatacaaatggtcaataagtatatgaaaagatactttaatcactaatcattagggaactgctggtcaaaacgacagagataccatcctatacccatcaggatgactattataaaaaacacacacaggccgggtgcggtggctcatgcctgtaatccccacactttgggaggccaaggcaggcggatcacgaggtcaggagattgagaccatcctggctaacatggtgagaccccgtctccactaaaaaaaaaatacaaaaaaattagcccggcgtggtggcaggcgcctgtagtcccagctacttgggaggatgaggcaggagaatggcgtgaacccaggaggcggagcttgcagtgagctgagatggcaccactgcactccagcctgggcgacagaacgagactctgtctcaaaaaacaaaaacaacacacacacacaataagcattagcaaatttgtagagaagttggaaccctcgtgccctgttaatgggaatgtaaaatggtgcagccactatggaaaacagtatgatagttcctcaaaagtaaaaacaggattagcagatgatccatcattcccacttctaggtatacgtccaaaagaattgaaagcatggtttcaaacagatatttgtacacccacgtttatagcagtattattcacaatagccaaaaagtggaagaaactcaagttggacagatcaatagataatgtggtatattcatacaatggagtattactcagccttgaaaaggaaggaaatactggcacatgctacacaatggatgaacattaaagacatgctcagtaaaatgccattcataaaaggacaaatgaaataggattccacttgaggtacctaatgtagtcaaattcataaaaaccaacagtagaatgttggatgccagcggttgtaaggagggaagaatgggaagatgaaataacttctgaggatggatagttgtgattattgcacaacaacattaataaatgtagtgtcactgaactatgtattttaaaagattaaaagataagtttcatgttatatataatttaccttagttttagatttaaaaaaacagcatttattttagtcactataacaattacacataaaatggaaatattgttgatttaaaaagccaatgcacaagctgggcacggcggctcacacctgtaatcccagcactttgggagggtgaagcgagcagatcacctgagattgggagttcaagatcaccctaaccaacacggagaaaccccatctctactaataatacaaaattagctgggcattgtgatgcatgcctgtagtcccagctactcgggaagctgaggcaggagaatcgcttgaacctgggaggcagaggttgtggtgagccgagattgtgccatggcactccagcctgggcaacaagagtgaaaatccatctgaaaaaaaaaaagccaatacacaattaaaatgggattctaaaacatactcaattaacattaaatatacaggtaagaaggaacaggtaaaaaatagaatggacaaaaattggtaaaattatagaactattttggctatagtaataattacactaactgtaaatccaccaaacactataactcaaaggtagatatggttagaaggatgaaaaagcaagacttaactacataatgtttataagagatggaatttttttttgagacagagtcttggtctattacccaggctggagtgcagtggcgagatgtcagctcactgaaacctcctcctcctgggttcaagcgattctcctgcctcagcctcccaagtagctgggattacaggcatgcatcaccatgcccggctaatttttgtatttttagtagagatggggtttcaccatgttggccagtctggtctcgaactcctgacctcaggtgatctgcccgcctcggcctccccaagtgctgggattacaggcatgaaccattgtgcccagccaagagatggaatttaaaagcaaaatgcaggtatagtaggagcaaatggatgaaaatagatataccattcaagtaataagcctaagaaaactgctgtggctatcttaatatcatatgaggtggattttaaggtaaagaatattataagacatgaaaagggacctttgtagtgttaagagagttaattcatctggtagacataataatcataagatatatgtcctcaataatagagcttcaaaataaatgaagcaaaaatttacccagcactttgggaggccaaggtaggcggattcacctgaggtcaggagttcaagaccagcttagccaaaatagagaaacttgtctctactaaaaatacaaaaatcagccaggtgtggtgtcatacacctgtaatcccagctactggggaggctaaggtaggagaatcacttgaacccaggaggcggaggttgcagtgagccgagatcatgccacagcactctagcctgggcaacagagtgagactccaatctcaaaaaaaaaaaaaaaaaaaattacagaattcagaggaaattataatacactgttctaagcaattaatggaatggtttgacaaaaatattagtaaagtcataaaagggccaggcgcggtggctcacgcctgtaatcccagcactttgggaggctgaggcaggtggatcacaaggtcaggagattgagaccatcctggctaacacagtgaaaccccatctctactgaaaatacaaaaatgagccgggcatggtgggtggtggtgggctcctgtagtcccagctactcgggaggctgaggcaggagaatggcatgaacctgggacgcagagcttgcagtgagccaagattgcaccactgcactccatccagcctgggcaacagagtgagactccgtctcaaaaaaaaaaaaaaaaagtcataaaagatctgaaccaccttgacttaattgacatttataagaggacacatgcatctactgaaaactcattctcttctagtgaagatggtaccctcactcattttatagcccatattctgggctataaaataagtctaagtaaagtctcttttaaaaaagagaactcatatatgttctctgatctcaatgaaattcaattggaaatagataacaatgtctagaaagacctccaaatttggatgctaagcaacacacttataaataatccatggttcaaaggagaaattaaaagctaatacaaaaatatttcaaaatataatgaaggtttaatgcatcaaaacttgtgggaagctattaatatggttctcttttttttttttttgagatggagtcttgctctgttgcccaggctagaatgcagtggcacaatcttggctcattgtaacctccacctccctggttcaagggatcctcctgcctcagcctcctgagtagctgggattacaggcatgccccaccatgcccggctaatttttgtatttttagtagagacagggtttcaccatgttggtcaggctggtctcaaactcctgccctcaaatgatcgcccgcctcggcctcccaaaatgctgggattacaggcgtgagccacacttaacttcacatttcataattcctgagtcttatcaggcaaaaacaagtcctgaaaaaacaaagtaaatctacttattatagtagggcagataatacaaagttgggcattaaggtaatatcgtatttatagttttaaagctgatgactctataaggacagtatgtgcttcagtgaaattataaacatgaaaactctgctttcagttcttttggatacatacccagaagtgggattgctggatcatctggtaattctacttttaattttttgaggaacaaccatactgttcctggaccaaactgagggtcgggctgctatttcttgccacccattaatgagatgccaatgaactgggaagaaagagtttttatttctgtagctggttacagggagaaggcctggaaattatcgccagaccaactcaaaattacaaagtgtttcagagcttatatcctttctaacctatatgtctacatgtaagtgtgcattcatctaaagacataagtgattaacttcttttaatctataactaaggtctgagtcctgaagaccttcctgtggagcctcagtaaatttacttaatctaaatgggtccaggtgctggggtgattaccctgctaaaccatggaggtttggggagttccttcaaacctccaatacccttgtttgtggaggcctggggagtttcttcaaaacccccaataaaacttgtttaatcctaaatgggtcctgttatgaattcctccattattttgtcatgctttaaggcccaggaaaggcctaagcaaaactcttgatgggcttttgttacattccagcctttgtataagggcactggcttttttttttttttttttaagcatttaatagttaacttaagcacttgattagtactgaaacagttgtgatggaggcctgcattagtgaaacctggcctgctacaatccccactgtcaatttgcgcatgatttctatcatgcttgtgtatttatttatcatgagaatcgtagggagatggggtgtcataatctttctggctactttcagctgagagagggtcattgttatggggcaccaaatgcagtactggagtggaggaggttgatttgttcccggtagcactgtctattttaggggcttagagagagtgcctgctgaaacacctagttttcagttcacagggctttaagaaagcaaagcttaggtttcagtgatttccagttagggaaaatggagaaaaaggaaaagaaaaaggaaaaaattgaaaacattttgagacttgcagccagaaaaattagaatttaatccaaactgtagaaaataataaaaactgaaaaacatcgaggaagactagaatttaacaggtgtaactataatttttgaaacataatttttctctcttgtttcccatttttattaaaagacaaatcatggtaggactggtttgctttattatacttggcctaattacttatataccgtgcagcaagaataattattttttacataggcgttttaaatgggctttgatggaactttgttccatagcaggaatctgagataagacctttttaaagccgagcccaaccatggatttataccatcaaatacctatgagttgggtgaattcctctcttcttgaggttccaagataacttggggttcctggcctgtcagaaagtgacattctttacttaccacaggtcagaaaccctgtacagggtctatgtacacaaattatgaggccagtttccaagggctttcttggcttcctaagtcaagtttgattccttaaaggagagcaaagtcaaagccttggtaaaataaccagtttttccaattgtgtcctgttacaaaagaaaacagattcttactgcacttatgcaaataactatattgccataacttaagaatactcacagtttcgaaattctggagaaaatcaggtagagagaaacaaatatgctccaaattttgttcataggagtatactgtacttaaatgttaaaaggtgttaatagctcaaaagaaaagtttccttgcctctgaaaagcaaaacaaaggattagcaacattttaagccgaaagtcaaaaagatcacttcagtctcctattagttcagttcatgcagttaattcctgtcctgtttgatattaatgaacattttaactcttcaagagtcatcaacgtttttcctctattttgatgtcacaatctccaaagttatcagaaacctgcattcaagagcacctgttagagctttacagctgattataaaaccaccttctaaagaggaccaaaacaagacagacaacaattatttatggaggacaaaaggttttagggtagccatagttaaagacacaattgatgacaagggtatctgttacctctgtggcacacaataattttaacataacaattataattattaatgataacatacactaagatatatcagaattataggagtcttccataactttggaacacataccaataatatatttatgcacatacagcccaaagaaagccaaacaccatttcatgtttgacaatgcttcctgtataattttatatcaaataagccacatttcacctttacattagtgtactattaatgttaaatccaatttttaataaaaccttatagacacatttacccaattttaatgtttgaccataaagtaagagttttatagacctttcataactctttacaatttttgttaaacagaaggttagtgctctaagagaaacccattgtgcttttattttaatgctcaatttacagaaaaactggatgatatccctttaattttagccaatacatttacacacagaattgtctttacaattacccttccacagcttgcttaaactttcatttttattttatccaacttaaaacaatcctttaaccttttaatctagtaaaaaatatccacattctcatgcctccttataatctttttaccaaaagtatattttactttccttacacaacttgcatgtaaactgttttttcaatagtcttaaatacacattacattgttaattcttagcaaccttttcttttggtgaaaaccttggtaaatttgggattttaattatatactaggtatggagcctacgacctagacagaaatgcaggtaaggtctgacttattctagcatctagctccatgtgtcctaggccttacctagctgcaaagcaggcaagttgtacagctaagagtcatagtggcattttataaagcatttaggaggcctaatcacctttaaattgtacaacatttcttgcataaatttcctttcataaattctttcacaacttacacagacaatctctgacatgccttgactttctgacttgttctaaacatccctctctttaaacaaccagttaatttactttaggacaagaatttaccatacaggagcccttcttgtataaattctcttttctttaaaactttttgcatagctaggggacatggctaatttcacatgtccccaggccgtatctagaatttaacagtccaaaataaattgaacactttttaagtcaaagaagcattttatgacctaaagcatttagcaaacctagtatttgacctgcataatttagaccaactatttacatttttgaagatacttttaccaataatctttaaaattctccttatttttataactttctgtatatctctcttatttcctggtttcttttaccttgttttatatataacctttaaataagctttgaataagacaacaattagttacccttggccaggcgtggtggctcacgcgtgtaatcccagcactttgggaggctgaggcgggcggatcacaaggtcaggagatcaagaccatcctggctgacacggtgaaaccccgtctctactaaaaagtacaaaaaattagccaggcgtggtggtgggcacctgtagtcccacctactcgggaggctgaggcaggagaatggtgtgaacctgggaggtggagcttgcagtgagcagtaattgtgccactgcactccagcctgggtgacagagcaagactctgtctcaaaaaaaaaaaaaaaaaagttaccctttaaaaaggacacaatctttagaaagaatgttttcctacgatatatttttattagaaaatacccaaataattagatatctgttgtttaatataactttagattctaaattatgacaagtttacttatgagtatgtatcccattacatttatctaattatttattttaatcatttacccagattatatatgaaaactgcgatagttgtcattaaagttaggaaaccaccattgcaaaattatgaccgagacagtgaaaatgatctgacctaactgactccatcttccttctaacctacaaggtattcttgtttattaacttagtttataatttagctttgaaacaaatgtgataacagtcctttcccagaacaaacttccttcatgtctgtggactagactgcttaaggccagaagattagaagttagggtattttggccaggcacggtggctcacgcctgtaatcctagcactttgggaggccgaggtgggcggatcagaaggtcaggagatggagaccatcctggctaacatgatgaaaccccatctctactaaaaatacaaaaaataaccaggcgcggtggcgggcgactgtagtcccagctactcgggaggctgaggcaggagaatggcgtgaacccgggaggcagagcttgcagtgagccgagatcgcgccactgcattccagcctgggcgacagagcgagactccatcttaaaaaaaaaaaaaaagagtattttactaaataattcaagatgtaactatcttcattaaaacaatattaatgtttcatttatttaaaaattacacatgcaaagattattctgtttgcactgaattatagttttgtagcctctatgccagattttgacaccttataatatttggcagagataagtatgaaattgcttgatcaataaatgcaaactaaaatgtatgctggaaactcttaagacatttctaatattactttaccaataatttttaaaaccagcttacttattaaagattttaagtcacataaacttgaaaaagcatttgactagtctttccttttttctgttattcaagtgcttttttctttgagccatttaattagacctcttttgtatatcttcagtagtgaaacatggtgtacacaagacaaatacataagtgtattatgcatgccaatagaagtacattttatagattcgtaagacctcatttttcagtctccctctactgcctaggccagagtacagtggcatgatctctgctcactacaacctctgcctcccaggtaaaagcaattctcgtgcctcagcctcccaagtagctgggattacaggtgcctgccaccatgcctggttaatttttgtatttttcttagagatggggtttcaccatgttggccaggctggtctcgaactcctgacttcaagtgatcagcccgcctcggccttccaaagtgctgggattacaggcatgagacaccacgcccggccttaactggatgtttgagctctgggtggagcccatactgaatcctgggttttcaaaaagggagaattattatgaggctagaccatgtgatgcttttacagtgcacttaaacaattttttcccaaagacatttctaagtgtctaaattacactttttctttaaaaccccagagtagcttctgtttaatagctattaatgaagaaaacagaattcagtcaactgagaagaaaaaaagttttgctcaaaaagataaggccctaggagagagagaaataaaaccaaaaacacgaaggccttttaaaggccttcacgcccccgtgcgcacacacacacatatgcacatacacattttggatgttagcttttaattaagctgactcccaatcattgagcttcaaaaaatctttctccttcccagaggcctctcagcagagatggacccaatacttcccattttcaagtttacatggtatcaaaaggaacaagacagacacacaaacaaatggaaacatttcagaaaaacccaaggggaagtgcactacggcaaaacagactctcaaaactaacgcaaaacctgatatcaaccaaagggaaagtgggtgtatgagccagccctgttgcttcccttggcagtaccggataaatggcttaaccagcccaaatgggaaaacaataggctcctggcctaagatcccattgactcaccctttgagcacgtccgctccttatctctgttcttccccagtagagaaagggacgtgtagatttgcacataaacagccctctggagggtcccctggggaaacctcacctgacagctgctgggatcctcctgaagactgtctcatcgcaagctaccagccgctgaacgcggcactgtccttatcttctggctggcgacttttttgttcccagaccaaactgagggtggggctgcccaataatgagatgcaggtgaatctcgctgcccaataagaagatgcaggtgaatctcgctgcccaataatgagatgcaggtgaatctcactgcccaataatgagatgcaggtgaactggggaggaagagagtttttatttctgtaactggttacaaggagaaggcctggaaattatcaccagaccaactcaaaattacaaagcttttcagagtttatatcccttctaagctatatgcctacatgtaagtgtgcattcatctaaagacataagtgattaacttctttgaatctataactaaggtctgagtcctgaagaccttcctctggagcctcagtaaatttacttaatctaaatgggtccaggtgctggggtgattacccttatcttgtctcctgctaaatcatggaggtttggggagttccttcagccctcccacacacttgtttttggaggcctggggagtttcttcagacccccagtaaaacttgtttaatcctaaatgagtccttgttaagaatttcttcattattttgtcatgctttaaggcccaggaaaggcctaggcaaaactcttggtggggttttgttacatcccagcctttatataagggcactggctttttttagcttttaatatttaacttaaccactcagtcagtactgacacagttgtgatggagggctgagtgaaacctggcctgccacgatactgtttttcccagtgtgtgttttacattcccaccaacagggcacgaaggttccagtttcttcacacctcaccagcacttgttattttccatgctgttgtttttaatatagtagacgttagtggtggtgagcatcttttcatgtgcttatgggccatttgcttatcttctttggagaaatgtctttcaagtcctttgccctttttaaaattttttaaaaatttttattgtaaattaagaaattacggccaggcacagtggctcatgcctgtaatctcagcactttgagaggctgaggcaggaggactgcttgagcccaggcgaacgttcaagaccagcctgggcaacatggcaactcccaataaattgtatgtatttatggggatttatagggtacaaagttatgttatgatttatgaatacaatatggaataattaaatcagctaatatgtccaacacctcaaatacttaacatttttatggtgagaacatttgaaatttattcttttagcaattttgaaatgtacaatatgctgttattaactacattcattgcactgtgcaacagatctcaaaaatcttattcctcctgtctaaccaatggtttgtacctttgattatcatctccccattcccccgtgcccagactctagtaaccaccattctattctctgcttctgagttcagttgtttttttttttttttttttgacacaaaaatttcacttttgttgcccaggctgtcgtgcaatggtgccatctcagctcactgcaacctccgcctcccgggttcaagtgattctcctgccttagcctcctgagtagctgggattacagatgcccaccaccacgcccagctaatttttgtatttttaatagaaacagggtttcaccatgttggccaggctggtctcgaactcctgacctcaggtgatccacaccctaccttggcctcccaaagtgctgggattcaggcatgagccaccgtgcccagcctcgttgttttcaatttcatgtatgaaaacatacagtatttctctttttgtgcctcacttatttcacttagcatgatgtattccaattccatccatgttgtttcaagtgacaaaatttctatctttttaaaggctgaatagtattctgtattgtctacataccacattttctttatccatttatctgttggtggacacaggttgattgcataacttggctgttgtaaatagagctgcaatgaacatggaagtgcagatatctccttgatatactgatttcaaatctttttggtaaatacccagaagtgggattgctggagcatataataattctatttttagttttttgaggaagctccatactgccttctgtaatggctgtactaatttacattcccaccaacagtaagcaagggttcccttttctccatatcctcaccaacacttgttatcgtgcatctttttgataatggccattctgataggtatgagatgatatctcattgtggttttaatttgcacttccctaatgattcgtgatgttgagtttttttttttcaaatatctgttgaccatttgtgtgtcttctactgagaaatgtctactcaggtcccttgcccattttgtaatcagattattttttctctttgaatagaattatttgagttccttatatattttagatattaaccccttatcagatgtatggtatgcaaatattttctcccagtctgtagcttattgcttcactctgttgtttcctttgttgtgcagaaactttttttttttttttttgagatgaaatttcactcttgttgcctaggctggagtgtaatggcatgatcttgactcacggcaacctccacctcctgggttcaagtgattctcctgcctcagcctcctgagtagctgggattaccggtgcatgccaccatgcccagctaattttgtatttttagtagagatggggtttctccatgttgatcaggctggtcttgaactcccgacctcaggttccgcagaaacttcttatgttgatataattccatttgtctatttttgcttttgttttttgcactttaggggtcaaattttaaaaaatgttgcccagataaatgttgtgtagttttagcccctgtgttttcttctagcagtttaatagtttaaggtcatatatttaagtctttaatccattttgagttgatttttgtatatggtgtaagataagggtccagtttcattcttgtgcatatggatatccagctttcctaacaccatttattgtggagacttttttttcccactgtgtattcttggcacttttggcaaaaatcaattgaccatagctatgtggattcatttataggctctgtattttgttccattggtcaatatgtccatttttatacccgtgccatgctgttttaattattattgctttgtagtatagtttgaaatcaggtagtgtgatgcctccagcattgtactttttgatcatgattgccttggctatttgtgtttttttttttttttttttatggttgcatatgaattttaggattgttttctctatttctatgaaaaatgatattggaattttgatagtgattacattgagcctatagattgctttggatagtatggacattttaacaatattagttcttccaagtcatgaacatttattttcatgcatttgtgtctctttccgttttatttgtctcttctgttttgttcattagtgttttacggtttttaacatacaggtctttcacttccttagttaaatttactaatttttttttgtcattgctcttaataggtttgttttcttaatgtctgtttcatatagttcattattaatatatagaaatgctactgattttcatatgttgattttgtatcccacaaccttactgaatttgtttacaaatttctaacagttttttggtggagtcttcagggttttctatacagaagatcatgtcatcggcaaatagacaattttacttcttccttttctatttgaatacctaataattcttttctttttcttgcctaattgctctggctaggacttccagtaccatgttgaaaagaggtggtgagagtgagcatccttgtgttgttcctgatattaaaggaaaagctttcagcttttcactgctgagtatgatattagctgtaagcttgtcatataaggctttttttgtgttgatacattccctttacacctaatttgattagagtttttatcatgaaagaatgttgtgttttgtcaaatgctttttctacatctaatgaggtgatcatattgtttttgtcctgcattttgttaatatggtatatcacatttattgattttcatatgttgaaccatctttgcatcccaggaacaaattccattttatcatggtcaatgattcttttaatgagctattgaatttggtctactggtattttattgaagatttttgcatctgtgtttattagagatattggcctataattttcttttcttacagtgttctattctggctttggtatcaaggtaatgcaagccttgtaaaataagtttggaagtagtccctcctctgtaatttatttgggaaagtttagaaaggattggttttagttcttgtttaaatgttttgctgaattcagcagtgaagccttctgggtcctgggtgtttctttgataggagacttttcattactgattcaatatccttaatcattattggtctgttcggattttccatttcttcatgattcagtattggtaggttgtatgtgtctagaaatttatccatttcttccgggtggttcaatcctttggcatataattgttcataatattttcatatgatcctttgcatttctgtggtatgcattgtaatgtgtctcatttttttttttatttgagacagagtctccctctgttgcccaggctggagtgcagtgtgacaatctcagcttactgccactttcacctcccaggttcaagtgatttttgtgccccagccacccaagtagctgggattacagatgcacacctccatgcctggctttttttttttttttttttttttgtattttattagggacgaggttttgccatgttggccaggctggtctccaactcctggcctcaagtgatccatccgtctcggcctcccaaaatgctgggattataggcatgagccactgcacctggcctcctcattcatttttgatttaatttatttgtcttctttcttttttcttagttagtctagttaaagtttagtgatttcatttattttttcaaaaaactaacagaattttgataatcttttgtatttttttcagtctctatttatttttgctctgatttttattatttcttttgttctgctaactgtgggcttagtgtatcttttcttctatttccttgaggtacaacattaagtcttgtatttgagatctttcttcttttttgatgtaggcgtttattgccatttcctcttaaaactgcttttgctgcatcccatacatttggttatgttatgtttccatttcattttctaatatactcttaaaattcccttttgatttcctctttgacacattggctattcaggagcttgttaccattcaagttctttgttcatttcttaatcacattgttggctttttgttgttgttgttgagttggagttttttatatattttagatattaaccttttatcagatatacaactagcaaatgttttcctcttcctgtgggttgccccttcactgttgatcatcattggatgcacaaaagtttttaatttttacatagtgcaatttatctactttttttcctatattgcttgtgttttggggatcacattcaagaaatcattgccaaatccaaggtcaggaagaatagttcctatgttttcttctaagttttagggttttcacttttatgttagattttggatccattttgagttaatttttgtatacgtgtaagttaaaggtccgaggtcattgttttgtgatgagtcaatgtctagatttcccaagaccatttttaaaaagattgtcctctcaattaaatggtctttatacctttgccaaaaattacttgatcatatacagtcatgcaccacataacaacatttctgtcaacaacagactgcatatgtgatggtggctccatgcaattatgtaacatgctacacaggtttgtagcctaggagcaaaaggctataccatataggccaggtgtgtcataggatacaccatctaggtttgtgtaagtacactcttctgatgttcacacaacacaattgcctaatgaccctttgctcagaacaatgttgagcaatacatggttgtacgtgcaagttcatttctgggctctctggtctatatgtcaggcaccttttaaatcagaagttcactatttaatgtttgatcctgtatcccaattttttaagtttgctatattataacccccatttataaaaatgtgtgtctgtgtgtatgtctgtgtgagagagaataagagaaagagagaaagagagaataggcatacctatggaaaaatagtggaactaaatgagacaaaatattaatggatgctatctttagctgagaatatcacgtgtggtctgtgtattcttgtaaaaactttccttgcccacattttctggaatgaacatgtttagaagagttttgcaggtgtatgttacttggccttccctgaaatatgaagggacaaacaaacactaaaggatgtttgagaggtgagagctgcaagaaagatgagggttctgtttagcttgggtgcctgggctcaagagaatgtgagtggatcctgggaggggtgaggtctggaagccactcatgcccatccctgctttgtccccacaggtctcagctgagtctgctctgatcacccaacaagacctagctccccagcagagagcggccccacaacaaaagaggtccagcccctcagagggattgtgtccacctggtatgttcaagatgggtctctaatccttgcccctcctccccttgtctccatgagcttccagtctgtttcctttgcacttccttgttctttattccacagagaggcattgggtgcctccagttcaaggctctgtccttctggagccttcctgctaggatggtatcaagacacacaaatgaatgagacagccaaagaaactgataggaaccttgagagagaattgagtgggacagagatggggctggtgaggcctccaggcaatggtgactttgggctgacatccggaggagggcagggccagaggttcagagagccaggaagagtgctcctaggagggttccactggaacaattgccagggggcaagagttggagaagatggagcaacagcagggggctgctgtggggagtggagggttaggaagttagagagacacgtggggtcagatcccacacagatgaagctggattttatttcatgagtgatggatgtccctgagaagttttcagcagagggccaccagcatcggatgtacatcttgagtgcccactcctggactgaaccggagcaagacaggaagcaggtggagggccttgagtgtgaggcgctcccctgggatgttatgtggtgtcccgtaaggtcatttgagcccccagagatgcagcaggaacctggcctgaagtgtgcttgactgttgtgttcgcctcgcacttcttcccccttttcccccatgtgtatgagttaggaattgattgctgcatgaaggtttccagggcaggcaagtgtggcaagcagtggcttttaaaatccatttacaaagttgcatttcttttccatgactaagggccacaggaaaggcttgcctgagggcaaaccctcacattgcacatgtgggcttgccaggagcagagcatggagaaggaagaacccagcgtgaagcagacacaaactcatctgtaaatgctcctattgctgtggtccagggtcaagaccaggaagcaggacgggaataggaaggactcaagacatatttggggtgtggatggatgacgtgtggggaatgaggacaatcgaggcaccaaattcaactgctcagggtaacttggcctctgaggggacagtgtgtggcagggctagcagtacacatttggggaccctagcacataggtgatgcttgaagccgctgtcttgagtgtgtccacctggaagaagttgtaaatactgaggaggggcacaactgagcccatgaggatttgaagttggagacgataggccagggagacaggactgcaatgggctgagcaggagcagttggagaacttccatcctagaggagagatggcccttccagccacagggagcaggccatagcaagtgtcaaggactgagatgtggaaactcctcgaaatgtgcatttctcttcctgtgaatgaggtcaagaatctgttcatgacacagacactgtttgtacactggttctcctaggttttcttcactcctagtaagaggttaggttttttttttttttttttttaaatcattgagtcacatgaattcttacagattagggaaattatacattgattgattgattgattgactgattgagataggatttcactctgttgcccaggctggagtgcggtggcaggatcatagctcactgtagcctcaaccacttgggctcaagcgatcctctcacctcggccttccaaagtgttgggattacaggcgtgagccactgcgctgggtccaaaattctaataaaaattcccatataacgccgggcgcagtgactcacacctgtaatcccagcacttcgagaggccaaggtgggcaaatcacttgaggccaggagtttgacaccagcctgaccaacatggcgaaaccctgtttctactaaaaatacaaacattagctgggtatagtggcgtgcctgtagtcccagctacttgggaggctgaggcaggagaatcgcttgaacccgggaggcagaggttgcagtgagctgagatcacgccattgcacttcagcctgggtgacagagtgagaccctgtctcaaaaaaaaaaaacaacaaaaaaaaaattatcatatatctttgcagtcattttgtggtttcctattttgtaattaagtcattgagccacatggacttcattttgtagtaagaggagagtgaggaagacacattattatttgacagccacctttttggttgccccaacactattattaaataatcacgtttttatcagtgacatgaatcactatgattatgtatgatacttacattattaagtaaggtttgtgtaatttggattttttagaatgtctttcaatattaataaaaataattcaggaatcttgtggctagcatataggtgattatggtctattttttgcgtttgtttttactcattctgccactctctgccttttaattgcagagtttaaactattttcaattaacatagttattgacaagaaaagatttgtttctgctcttcagttatttgttttctttatgtcttatatatattttgttcctcccttatcaccttttgaaaaaactttagtttatttcttggcatgtaccattttcactcacttcttttcttttctgcatattttaaaatatattttctgtttttcttaaatatatattttgtgtatatatatttaataaatatatattttgtatatatatatttaataaatatatattttgtatatatatttaataaatatatattttgtatatatatttattaaatatatattttgtatatatttaataaatatatattttgtatatatatttattaaatatatattatatatatttaataaatatatattatatatatatttaataaatatatatttaaatatatacttagtatatatcttaaagatacatatcttaaatatatatatagatatatatatattttttgagacagggtctgctctgtcacccaggctggagtgcagtggtgcgatctcagctcactgcagcctatggctgctgggtttaagcgattttcctgcctcagcctcctgagtacagggagtagccaccatgcctggataatttttgatttttagcagagacagggttttaccatgttggtcaggctgtctcaaactcctgacctcaagtgatccacctgcctcggcctcccaaagtgttgggattacaggtatgagccacgcacctagcctaaaacttattttcttactggtttccttgaagattacaattaccttcttaagtatctaaacaggtagttttataataccggcagaatttcattgcaatccaaatactgtgctcctgtaccactccatctctccagctttctattgttgctgtcatagatcacatccttgcacgttgtgtgaccactgacgtcgatcttaaggacatgtatgtgtatggagcaaggttgacttgtgatggttgattttatgtgtcaacttggttacccagatacttggccaaatattatcctagatgtttctgtgaaggtgtgtttgttgttgttgttttgttgttggttttagatgggattaacatttaaatcagtgggctttgagtcaagcagattacccccttaatgttggcaggtcccatctaatcagttgaaagcctcaatagaaaaaagactgacctccaccaagaaagagggtgttctgccagcaggcagccttcagacctgagctgtgactcttctctgctggcctatcctgtaccttttgaatttgccagcctccacagttatgtgaaccaattccttaagataaatctttatctctctagagcaggggcccctgacccccaggccatggaccagtactggtccgtggcctgttaggaaccaggccacacagcaggaggtgggctgtagatgagtgagcattactgcccgagctctgcatgccgtcaaatcagcggcagcattagacttcataggagcgtgaaccctattgtgaactccacatttgagagatctaggttgcgcactccttatgagaatctaatgcctgatgatctgtcactgtctcccatcacccccagataggaccatctagttgcaggaaaataaactcagggcttccactgattctacgttatagtgagttgtataattatttcattatatgttaccatataatagtgatagaaataaagtgcacaataaatgtaacatgcttgaatcatcctgaaaccatccccatgcccccaactccagtccgtggaaaaattgtctttcaggaaaccagtccctggtggcaaaaatgttggagacccctgctctagagagccctgactaatacagaatttttaaagatttgaaattcttttaaaccatacttgatctccaagtaatggaaataataagattatatttccacctaacataatacagctatcctgtatacaactgaaaacgcactaaccctttctccagaagaggatgcaaagttcttgagtggtgtttactcctttccttgataccctggaacataaatactataaagtgaacaatacttaaatactatgatataaattcaaaatatcttgtgttacataacaaggggataagagaaggaagaaaacacagatattcgcttaacatatatttacacataaacacacacacataacacaataaggaagaaatacttataatgattacagtccttatttccatagctggtcatgtcattgtagctggtatttataagaagcttctttcgctgtgcattctgtattccctgtgccctcactaagcacctcagctggtcatggctctgtgcctggtagagtgaactaacctttattcctgaagggtctgagctataagtggtcctgctttaatagggtcgtggtagttttccattgactttactcacagggcatggtaatactaagagatgccctaaggaatctcctgtattctagacatcctcttccttacgtccattgtggaataacagtccaattttcccttcaatttcccctttgtgttcagaatcagtcaatccagccagcagggtttgtgtaactggttttcgcctgttgattcagaggcatgaggaacccaaagtggccaagtggcagtcttcaagttacacagaatcactgttgtgtctcctcatggaatcattcctccctctgaaactcagagctctagcaaagcataaagcagcaaaaattttgataacaggccactaagggtaatgtggagtggggccattcctgcttccacccctagattcctggacacatgaatcctagcaatggaagaagcaaccgcatgtattggaggataattcagagcatagacagtctcctggagaaccttgttgcagcccttcaaggtactgccacccagctgacattgtaaatgagttttcaaaaagccatatcccaccatcttaccaagccagcagttttgagatggtggggaacatggtaagaccagtaattccatgagcacaggcccattatagtgggcgcttcatttgccatcaagtgagtccctcaatcagaagcaatgctgtgtgaataccatgactgtggataaggcattctgtgagtccacagaggatagttttgacagaagcattgcatgcagggaaggcaagtctatgtgcaaaataagcttctcttccagtaaaaatgctgccccctccatgatagaaatggttcagtgtaataatcaacctgccaccaggtagctggcagactgaccctctgaatggtgctatatcagagactcagtgttggactctgctgcctatagattgggcactcagtagcagctgtagccaggttggccttggtgagggaagtctgtattgttaagcccatacataacctccatccctgccaccatgcacactttgttcatgagcccattgagtgatgacaaggatggctgggaaagaagctgactggtagtcacagaacaggtcatcctatccacctgattattaaaatccttccctgctaagatcactttttgtgaagatatttgtgtcacatggggcacaaatatcttcatggtttttttacccattgagaaaggtctatccacacacctcttccccagacttccttgttatcagttttccttcagagcctctgaccctccagccaaatcattgaccacagctcatgaatcagtatataactacatgtctagccattcttccctcaagcaaaatgaacaaccaggtgtactgctcagagttctgcccagtggcaggatctcttttttttgagacggagtttcgctattgttgcccgggctagagtgcaatggggcgacctcggctcactacaacctctgcctcccgggttcaagtgattcccctgcctcagcctcccaagtaactgggattacaggcatgtgccaccatgctcggtaattttgtatttttagtagagacgaggtttcaccatgttggtcaggccagtctcgaactcctgacctcaggtgatccactcacctcggcctcccaaagtgctgggattacaggtgtgagccaccacacccggcctagcggatttcttttcaccactgtccttcagggacgtcccagacagtggatgtgatgctgcaaacatccacttctaagggttacctgtatgtggtgcagaaccatctgtaaaccttcttctggcaactgaccatagggaattcctcatgaggccataagtgcaggccaggcaaaagaaagtaatattgcaggagtggggatcatgggcacttgggccacttcttcatgtaactttcttgtgccttcagggcctatttaagcccaattttgtatatataccaattacatttgaaaatggaaatggaaactttaggctgtatgtgcccaaacttatggcttggtaggcaaaataacactcagttcacgatgagcagtcaggtcgtagagtaatttggtggcctatggttaaccattcagtctgcactaaggcccagaaacaagccaagagctgtttctcaaaaggagagtagttatctgcagaggatggcaagtctttgctccaaaacctaagggcctgtgctgtggttgacctagagtgggctactaaaggttcaaaacagcattgctgtctgccaccaatacttcaagcaccgttgggtctgctgggtcgtatggcccaagtgacagaaaaatgtctacggcagcctggacctgttgcagagccttttcttgttctgagcaccactcaaaactagcacatttttaggtgacttgataaataggccagagaaacacacccaaatgaggaatatgttgccaccaaaatcaaaataagcacactaggcattgtgtcattttcttggttgtagggaggtgggggtggcagatacaacaatttatcttttatcttagaatatcttagaagagaaggaatatcttatgtgccacatcattcaacaactaggaatttgtttcccagttgttgtccttctactgaggtaaaaggcccttgaaattttgtcagatttatttcccaccccctgacatgcaaatgtcttaccattaagtctagaatagttgctacttcttgctcgtgaggttcaatcagtataatgtcatcagtataatggatcgtcttgtgtgttatcttgtggaagggaaaggccatcaatatccctgcaggccagatgtggtggctcgcgcctgtaatcccagcagtttgagaggccaaggtggctgggtcacttgagaccaggagttctagaccagcctggccaacatggtgaaacctcatctctactaaaaatacaaaaattagttggatgtggtggcacacatgggtaatcccagctacttgggaggctgaggcatgagaatcgcttgaacccaggaggtgcaggttgcagtgagctgagatcatgccactgcactccagcctgagagacagagcaagactctgtttaattaaaaaaaaaaaaatacctgcaaactaaattatgacatagggctgcgagttgatgcatcccggagacaggatagtgagggtatattgctggccttgccaactgaaagcaaactgcttctgggagtctttattgacaggtatgaccaacaaagcatttgccagttcaacacctgcataccagggtaccagggatgtggcgatttgctcaaacaatgaaaccatatctgggacagttataactggaatcaccacctggttaagcgtatgataatccactgtcattcaccaagatccatctgtctttggcacaggccaaatagtcaagttcaatgggcatgtgatgggaatcaccacagatgcatcctggatggtggtaatgatctctgcaatccctccaggaatgttgtattgcttttgtttttttgtgctttacaggcagggtatcactctgtcacccaggctggagtgcagtggcacaatcatagcacactgcagcttgaactcctgggctcaggcaatcctcctgcctcagcttcttgagcagctaagactacaggcatgtactgtcatacctggataattttgtatgtgtgtgtacagatggagtctcactgtgttgcccaggctggtcttaaacccctggcctcaagtaatcctcctgccctgacctcccaatgtgctggaattacagacatgagccaccatgcccatctggtattgcttttgatttactattttttttaagtaaatgcaaatctggtggcttccacctggtcttttccaccataatagtcttcacttcacatgtcagggaatgaaggtggggattgtgccagctgctgagtatgtctattccaattacacatactaaaatgaggaaatcagacaggatgggtgtggggacccactggcccctttctgagatggacttgagcttagtttgagtaatgacaacataacttcaatggtatgcaaacactgtgctcctgtacttctccgtctttcctcctccatcttgttgttatagatcacatccttgtacattgtgtgcccattaacatcaatttgtaattattgttttctgcatttgctctttaaatcatataagtaaataagaggatttacaaaccaaatgtaccataatactgtgctacagactgaattgtgtccccaaaatcatatgttgaagcattaccatccaatgagatggtatttggagatggtgcctttgggaagtaattgggtttagatgaggtcatgagggtggggccctcatgatgggattagtgcctttttaagaaaagacccagacaacttgctctctctcgcttgctcgctctctctctccccccctcttctggtgtgtgcaaggaagaggttacgcaaatgcacagcaagatggtggccatctctagaactatgataaataaatgtctattgtttaagccacttggtctatggtattttattatagcagcctaagtagctgcgtaccagcatttatatttacctaaatagttaccttttccagggttcttttttttttttttttttttttttttttttttttttgagacggagtctcgctgtcgcccaggctggagtgcagtggcgtaatctcggctcactgcaggctccggcccctgggtttcacgccattctcctgcctcagcctcccgagtagctgggactacaggcgcccgccacctcgcccggctaatttttttttgtatttttagtagagacggggtttcaccgtgttagccaggatggtctcgatctcctgacctcgtgatccgcccgcctcggcctcccagagtgctgggattacaggcgtgagccaccgcacccggcctccagtgttctttatctcttcgtatgcctttgagctattatctaatgtcattacattacctcctaaaggattccttttagcatttcacagggcagatctactagtaatgtgctccattacctttcatttatctaagaaggtcttaatttcttcttcattcttgaatgataatgttcctggatatcaaattcttggttgcaggattttgtatgcttgtgtttttgtttcttggcactttaaatatgttacccactcccttctgggctctatggttcctggtgagaaattagctaataaccttattgaggttcccttgtacatactgagtgggccacttgctactttcaggattttctgttggtgttgggcttttgtccatttgactataatgtgtctcagtgtagttctcttttaacttatcctgcttggagatcattgagtttcttggatgtgcagacaaatgttttttaaaagtcttgcacctccttgttaaatatcattcctaaatgttttattcatttttatgtcattgtcaatgaaattgttttcttaatttcctttttggattgttctttgctactgcaaaacttttacgctgaaaactatcaaacattgctgtaagaaattttaaaaaagcaaaataaacaggaagatattccatgttcatagatcaaaatggtgttaaattacccaaagcaatatacagattcaatgaaatccctaccaaaatctcagtggtgttattttaaaaatggaagaacttatattcaaagtcgtatggaattaaaaagacttattgaccaaaaacaatctggtaaaagaaaagcagagttggcgggactcacactttccaattttgaaacatatcctcattccagggcagctttagtccccttttctttggatcattctttgactctatagagattcctcccgttttcttcccatggctgatggtgtgagctttaattttgaaggcttttcccattgttgtatgacttctgctcctggtgtatcttccactggctaggagctcattcagaacaggtattaggacattcttctgtgcattttaaaggtctaagatggcactgtctaatatagtagtccctaggcccatgtgattgccaatcacttgaaatatgtgaggcaggtggatcacgaggtctggagttcgagaacagcctggccaagatggtgaaaccccgtctctactaaaaacacaaaaattagccgggtgcggtggtgggtgcctgtaatcccagttactcgggaggctgaggcaggagaatcacttgaacccaggaggcagaggttgcagtgagccgagatcgctgcactctagcctgggcaacagagcaagactccgtctcaaaaaaaaaaaaaaaaatgctactgcaaattgagatgtgccatgagttaaaatatacgcaggatttgaagacgtactgtgaaaaaaatgctgtaaaatatctcaatgttttatgtggattacatatttaagtgatattatctggggtacattaaattaaaatgcattattaacattaatttcaccccttctcaccttttttaatgtgctgagtgtggatttaaatttcatatgtgggctgggcacagtggctgacacctgtattcctagcaccttgggagtccaaggagagtgaatcacttgagcccaggagtttgagaccagcctaggcaacatggtgaaacctcgtctctacaaaaaaaaagtacactaaaaattaacccggtgtggtggtgtgcacctgtagtcccagctatttgtgggtcggggggagagggagggtccgggaggtcgagggtgcagtgagctgagatcacaccactgcactccagcctgggctatagagcaagaccctgtctaaataaataaataaataaataaataaataaataaataggccgggtgcagtggctcacgcctgtaatcccagcactttgggaggcctaggcaggcagatcatgaggtcaggagatcgagactagcctggccaatacggtgaaaccctgtctctactaaaaaaatacaaaaattagccaggtgtggtagtgtgtgcctgtaatcccagctactcaggaggctgagccaggagaatctcttgaacccaggaggcggaggttgcagtgagccgagatcacgccactgcactccagcctgggtgacagagtgagactacgtctcaaaaataaaaaataaaataaataaatgtgtggcttatatttcttttggcagtgctggtttaaggtgtgtaaatgcagaattgatgaactgaccaagctaggtagaggagatttccctcttttggttccacacatccctgaaagaggagtcccccagccaccactgccagcttctgggaatcctgtggcatttcattcaccggcttttctctcccctcccaggacaccatatctcagaagacggtagagattgcatctcctgcaaatatggacaggactatagcactcactggaatgacctccttttctgcttgcgctgcaccaggtgtgattcaggtacagaacatatggaccccatgcctaaaggtggaatgcggggtgatgacataaaagttgtagctaaaatgggatcaggagacctagattctggtccaccttggtcttcatcataccatgttccatgattttgtctttgagctttttaataaataaaacaggcccggcacagtggctcatgcctgtaatctcaacactttgggaggcatcacttgagcccaggagtttgaaaccatcctgggcaacatgagaaaccccgtctctacaaaaatataaacattagccgggcatggtggcgcgtgcctgtatttccagctacttaggaagctgaggcagaaggatctcttgagcccaggaggccgaggttgcagggagccgagattgtgccactgcattccagcccaggcaacagagcaaaaccctgtctcaataattaattaaaataataataatacagaaattatttgtataatgtatgctacatggtaaggaaatcttttaaactgtcagctgcaagggggtggggccatgagccaggccaagtggacagggctggatctcagcagtggcacaggtctgctttggggccaggctctctcccctgggctctgtgctcctggcaggtgctcggcctcactcacccttcaggttctcaggcctctccctcctccccagcaggctgggccttggggaagtcccccaagggctcctctccttgcagtctctcaggtgatcccttgcacttcccttgctactggccatgcaatctaaacgatgcttgtcccctaaacggtgctttcccctaatctaatgtaataaataatgaactgtggtccttttgtatgactcaacgagtgttagtgacagctgaagggtgggtatcctgaatgagccatgagtgtgctggtgcagaaactggccctcagaactccttggcaaactgagttgagctgagtagcagggtcttggggtggggaggaagggtcaagggacacatcaggaaaacacattcccaaaaccttatgctctgtcgtcaggtgaagtggagctaagtccctgcaccacgaccagaaacacagtgtgtcagtgcgaagaaggcaccttccgggaagaagattctcctgagatgtgccggaagtgccgcacagggtgagacaggagccgggggctcccagtagctccatggaaccccaaaagacccaagtctccttgtacccctgtctctcccctgacagcacccgcaaggggcatccttgaggctgtggctgcccctcctggtccctctgcgtgtcaccacccctgccccctgcagcagcctctttccacccctccccagcacgagtccccttgaccaggctgacttgttcactgaccacagaaggccatgacttggggcccatgataattttaggggcccatgaaatgatttaatttctcttgaaataagaagaatgagtagaatgcagccaggcatatattcatctttataccaattcagcaataaaatgtattttttaatatttttatgcatgcaggggcccataaagacaaaagtgcccatggcccacaaaaggcataataaggccatgggtggagctccttcaagttcccatgaggacctgagcccacccagccggcctcacccctggcccctgatccctcagtaagacctgtcttttccctatttgggttttaggggccaagagtaatttgctcttctctggcccccctagtatttgctgtgattgggggaaatgggcagacagctggggacaagagctcacttttgtggttgactggaagaccggactcatcttgtggccacacgggcttgtgaccttcccctggagtgtgattgctcctaacgcaggcctcccctgcagcccagggaagctcagtgtgtgcccagcacagaaggctcctggaactgcagctctgaccccagagcagggaggccgaggggctgaagtgcgcatgctcagacccttccccagcctcaagaagggagcacagggggacccactgctgacacgaggagactgtccttcccctgacaccttctcagggacactggggagggagggtggctcctctttcatcccacctggccagctttccatcaagagtcccccctctccctctgtgtgtgtacccaggtgtcccagagggatggtcaaggtcggtgattgtacaccctggagtgacatcgaatgtgtccacaaagaatcaggtacaaagcacagtggggaagtcccagctgtggaggagacggtgacctccagcccagggactcctgcctctccctgttctctctcaggcatcatcataggagtcacagttgcagccgtagtcttgattgtggctgtgtttgtttgcaagtctttactgtggaagaaagtccttccttacctgaaaggcatctgctcaggtaggtgctggctgagggcgggggcacagggcactctctgccctgccccctcccaccctattcccacagacagaaacgcctgcccctgccccaagtctaagtgcctccagcctggctctatcctcctcctcgtggtcacccccatccccacatcccgtgcaccccccaggaccctggtctcttcagtccctctcccaggtctgggggtccccatatctcccagccaagtccaggagggcagggccagttcctcccatcttcaggcccagccaggcagggggcagtcggctcctcaactgggtgacaagggtgaggatgagaagtggtcgtgggattttttcagccttggtcagagcagaaccagagattttccaagtgtttgtttttactctagttccccttctcatcccccttcctcagggtgtctctgagttgtaaggccccattctgtccccagccccagggctccttgtccagtgtcccagcccccagcccagccctgcgccccactgtcctctgggaggggggtgcttcatgggcccctcccttcctgctaaggagactgcttcttttttaggtggtggtggggaccctgagcgtgtggacagagtgagttgatttctccaggagctgggggctcaggggttcaggaactgcttcctgggacagcagaacctgggtgggtgggtccccattgtcctcatggctgccctgactctctgaagtggcctgggtgctctgggctgactgtgggggacacatggccattttgagcaccacataggctggtgagccctgctgcagcccaggtgacatcctcaccccacagcctgcaccctagggatggggtgtctgcctgagcacagcactgggggcctggccccagcagcgggtcctggatgtgctgagtctgggctgcctgcggtgacctcactgagagggggtggggatgtcaggtgcagctgcatactgaggaccctgcagcgagccctaggtgtggactcctgagtcggctttttgccttcccaatgtctttttccagagctcacaacgacctggggctgaggacaatgtcctcaatgagatcgtgagtatcttgcagcccacccaggtccctgagcaggaaatggaagtccaggagccagcagagccaacaggtgtcaacatgttgtcccccggggagtcagagcatctgctggtgagtgggggacagatcattttgtttcctggcatgctgctcacctgggatttcgtagacagtgggagagggcagtgccttagctctcctggcccaggggaaatggaacctgaaggagccaggggactgcaggggatggagcagctgcactgaggtggtgaccgtgccagtctgcaggacatctgcttcttactccctgtcctgtccttgctgtgtcccccgagcctggagctccacaggcatagagtgggggtcacagggttcattgatgagtgaataaggctgcacagtctccatcgtatgctcctaacagaagtcagtgagcccttgcttgtaacagcaggagttttaaatttactctgaaattgttattacattgaacatatttcaaagttcgtagggcagcttccaaaaagtaggattccaagtcgatgcacaaagggcttttgtattggacacacgcacacaatcagttcatatcaatccatcagttttgatgtgatattgagtaggcaggaaatctgtatatacatttattgttcattgctcgtaagcactgaaagtccttccctcgaacataagatgagactatccagtttcctgcagtgttttatttttaatgatttgatttttaacatacagcaatataatctaaacagaattgaattttcgattcaatataagctgagaaactccctgaattattctgagtctctgtttccttcttccaagcccatttagcaaccaattcttcctttttcccttgcctttgcccttttgccacctcctttgctacatgtcaaatgtttacttttttctctcttcctcttcactcttttttaaaaaaacaaacaaacaaaaaaaaactagatcttatccttgaaaatgtcaaatgtttatatgggcagagatctcttccacctagactgtttctgtttcttccttgcatctgtaccactttctttttaaataaagagaagagattttaaaaggaaacaaatgaacaatgccaatacttcctccatgcttattaatgactttgaagatttttttttttgagacaggatcttgctctatcacctgggctggagtgcagtggcaccatcttggctcattgcaacccctgcctcctgggctcatgtcatcctctcacctcagcttcctgagtagctggaactataggcatgtgccaccgtgcccagctaagttttgtattttttgtagagacgaggtttggtcatgttgcctaggctggtctcgaactcctgaactcaggcaatccaccctccttggcctcccaaaatgctgggattacaagcatgagccaccatgcctggcctgatcattttttgaaagcaggtcacccatagccacacatccaccagagtatgaaaaaacttgatcataccaagagccttctttactctttcccagccttttggcccttcttatttcaggtaactacagtggataatttcttgtgattctttgctaaactctttatgcatataccatctaggtacataaatgcatatgtatttatgtggtattgacatgaaaaggattatatcatgtacaacaccaaacaaaactgtctaatatgttttaatatcttagacagcaaatatgttttcaaaattatttttacacatcttataatttagaattagataaaatttagaattataagattttctctagtacccctcccgcccacatagtcactagactttacaaatattaatttaaattaatacatggttctaggaatgattgacatcctttcaacattcaattttattatcaaagaagataatatttcaagtcaagtgttctattatgactcaatcgagatttgggagtttatttcagataaatttttcctattcctcatcaaagctgtttctttgcattttgggtcttcttgtaagtccattttctaatttattatgtctgctgctacttttcttttctttctttctgagatgggtctcactcttgtcacccaggctggagtgcagtggtacaatcatggctcactgcagccttgaccttctaaggccaagtaagctcggacttaccggcttctgagtagctcggacgacagttttgtgccactacacccagcttattttattttattttattttatttttagaaacaggatctcgctatgtcgcctaggctggtctcaaactcctgggctcaagcagtcttcacacctcagcctcccagagtgctgggattacaggtgtgagccaccatgcctggcctctgctatgtggtttaacattcatcagggctaggtgcagtggctcacgcctgtaatcccagcactttgggaggccgaggcggatggatcatctgaggtaaggagtttgagactagcctggccaacatggtgaaaccctgtctctactaaaaatataaaaatacgataaaataattagctgggcatggtggtgcacacctgtaatcccagctacttgggaggctgaggcaggagaatctcttgaacccagaggtggaggttgcagtgagccaagatcgcactattgcactccagcctgggagacggagtgagactctgtctcgaaaaaaaaaaaaatcatcaagacatattcacttttgagtattacaaattaaaccttggggttttaaaaatatacactcctaatctaaaatattgactgctgtatcggcctccttccgagagtcttgcccctttgtctcctgtcttgttgccagacctttcagaacaatgttctggaagtgacgtgctgcaggtctcagagctggctggtggtcggggtcagtactggactgtaggactcctggctctgaccaggacattccccactatgtgttacaggaaccggcagaagctgaaaggtctcagaggaggaggctgctggttccagcaaatgaaggtgatcccactgagagtaagtgttttgctcctggagatgcagcaggaatggagggaatagggacagggtcctaactgctgtccccagaggtcagagggctcttccagagtattccatgctggaagccgtgggtcctgtgctatagaccatctggaccctaaactgtcttctcccatctcttctccccactctacctcatcctctctgcaccctatcattgaccctaatgactctgtccgtcccctcatcctctctcctcctttgttcagggcctgatgtagcccccgcctgcccctgaggacctcctgaggggctggcctgtcctgcacagcaccactaaccccagtgggctaaggagctcttgacctgtgcctcagcccaatttgcagagctgttgtgtaaactacatacgaatgccaaagacttaatgcaaaaaagagtggaaaatatttcactcataatttttgtatattgattgtatattaaattatattttaaatatattcagtaccatacattaaaatgaatgtcacttgtttctgatgttctttaaaataaggctgttggaaaacatagcctcgtgttcctgaccctgtctatctctgaggacggcgaggtgcatcatgttgcacacacgtctcatttaatccctcatcgtcccgagatctgggcagcattgctcggtctttgggttcacttcttgctcagagtctgtttgcctccacctagctctgccccagccccaggaagtgaggccgagctgggtgaaaacagaggtcccctgtcccaggccctgtgctttccacagatgcagaagtggccgccctgggacctgctcccatgacaagcgcagcccaggcagcctcctccctcctctaagctcccgctgcagccactgtctctccctccctcggactctcacgcactttactttctgcctctgtaacgtccatccatactcccctggtgggttctcagccctgtatgagggctgattctctgacgactttgactccccgcagtgccttgcgtgtgggggaggccaggcagtgtgggcgcgctctctgtggatgggaagcgggtgggcactggagcggcaggtttgcccgcacacggggctctccaggttccccgccttgggttctgggcctgatgtggaatcctctgccctttctgagtcccaactcacctggctgtctctgtggctttctccaccagctctgagacagtgcttcgatgactttgcagacttggtgccctttgactcctgggagccgctcatgaggaagttgggcctcatggacaatgagataaaggtggctaaagctgaggcagcgggccacagggacaccttgtacacgatgctgataaagtgggtcaacaaaaccgggcgagatgcctctgtccacaccctgctggatgccttggagacgctgggagagagacttgccaagcagaagattgaggaccacttgttgagctctggaaagttcatgtatctagaaggtaatgcagactctgccatgtcctaagtgtgattctcttcaggaagtcagaccttccctggtttaccttttttctggaaaaagcccaactggactccagtcagtaggaaagtgccacaattgtcacatgaccggtactggaagaaactctcccatccaacatcacccagtggatggaacatcctgtaacttttcactgcacttggcattatttttataagctgaatgtgataataaggacactatggaaatgtctggatcattccgtttgtgcgtactttgagatttggtttgggatgtcattgttttcacagcacttttttatcctaatgtaaatgctttatttatttatttgggctacattgtaagatccatctacacagtcgttgtccgacttcacttgatactatatgatatgaaccttttttgggtggggggtgcggggcagttcactctgtctcccaggctggagtgcaatggtgcaatcttggctcactatagccttgacctctcaggctcaagcgattctcccacctcagccatccaaatagctgggaccacaggtgtgcaccaccacgcccggctaattttttgtattttgtctagatataggggctctctatgttgctcagggtggtctcgaattcctggactcaagcagtctgcccacctcagactcccaaagcggtggaattagaggcgtgagcccccatgcttggccttacctttctacttttataattctgtatgttattattttatgaacatgaagaaactttagtaaatgtacttgtttacatagttatgtgaatagattagataaacataaaaggaggagacatacaatgggggaagaagaagaagtcccctgtaagatgtcactgtctgggttccagccctccctcagatgtactttggcttcaatgattggcaacttctacaggggccagtcttttgaactggacaaccttacaagtatatgagtattatttataggtagttgtttacatatgagtcgggaccaaagagaactggatccacgtgaagtcctgtgtgtggctggtccctacctgggcagtctcatttgcacccatagcccccatctatggacaggctgggacagaggcagatgggttagatcacacataacaatagggtctatgtcatatcccaagtgaacttgagccctgtttgggctcaggagatagaagacaaaatctgtctcccacgtctgccatggcatcaagggggaagagtagatggtgcttgagaatggtgtgaaatggttgccatctcaggagtagatggcccggctcacttctggttatctgtcaccctgagcccatgagctgccttttagggtacagattgcctacttgaggaccttggccgctctgtaagcatctgactcatctcagaaatgtcaattcttaaacactgtggcaacaggacctagaatggctgacgcattaaggttttcttcttgtgtcctgttctattattgttttaagacctcagtaaccatttcagcctctttccagcaaacccttctccatagtatttcagtcatggaaggatcatttatgcaggtagtcattccaggagtttttggtcttttctgtctcaaggcattgtgtgttttgttccgggactggtttgggtgggacaaagttagaattgcctgaagatcacacattcagactgttgtgtctgtggagttttaggagtggggggtgacctttctggtctttgcacttccatcctctcccacttccatctggcatcccacgcgttgtcccctgcacttctggaaggcacagggtgctgctgcctcctggtctttgcctttgctgggccttctgtgcaggacgctcagcctcagggctcagaaggtgccagtccggtcccaggtcccttgtcccttccacagaggccttcctagaagatgcatctagagtgtcagccttatcagtgtttaagatttttcttttatttttaatttttttgagacagaatctcactctctcgcccaggctggagtgcaacggtacgatcttggctcagtgcaacctccgcctcctgggttcaagcgattctcgtgcctcagcctccggagtagctgggattgcaggcacccgccaccacgcctggctaatttttgtatttttagtagagacggggtttcaccatgttggtcaggctggtctcgaactcctgacctcaggtgatccaccttggcctccgaaagtgctgggattacaggcgtgagccaccagccaggccaagctattcttttaaagtaagcttcctgacgacatgaaataattgggggttttgttgtttagttacattaggctttgctatatccccaggccaaatagcatgtgacacaggacagccatagtatagtgtgtcactcgtggttggtgtcctttcatgcttctgccctgtcaaaggtccctatttgaaatgtgttataatacaaacaaggaagcacattgtgtacaaaatacttatgtatttatgaatccatgaccaaattaaatatgaaaccttatataaaaa

SEQ ID NO: 26 - DNA, 33711 bp, Homo sapiens
gcaggtgccccgaaaagggggcggggtcaggggtgccctgaactccgaatgcgaagttctgtcttgtcatagccaagcacgctgcttcttggattgacctggcaggatggcgccaccaccagctagagtacatctaggtgcgttcctggcagtgactccgaatcccgggagcgcagcgagtgggacagaggcagccgcggccacacccagcaaagtgtggggctcttccgcggggaggattgaaccacgaggcgggggccgaggagcgctccctacctccatgggacagcacggacccagtgcccgggcccgggcagggcgcgccccaggacccaggccggcgcgggaagccagccctcggctccgggtccacaagaccttcaagtttgtcgtcgtcggggtcctgctgcaggtgagtccccaccgcggtcctgcctggggaaaagcgcgcctggcaccgggagggggcagagagagagggggacgcggcgggggtgcctggcccgggtcacttgtggcggggcatgtccgggcaggaggagcccgtcgtcggagtcggaggaagaacggggtccccggggccaggcaggagcgacccgggcctggaggcagcagagccccctcccgcaggaggctgggcccggggactccaccccgttggctgctgcctggcgcgtctccctcctgcccacacctcacgatgtatcgggaagtttcggaatcgatagagctcaagtgtgtaaacttccaagccaactcccagccacaccagctgcgtgaaggggagcgccattctccccactccctgattccctccccacccccgtccttcttttcttctcttctttttttttttttttttttttttgaaacggagtctctctctgtcgcccaggctggagtgtagtggcgcgatctcggctcactgcaagctccgccttcctggttcaagcgattctcctgcctcagcctcccgagtagctgggagtacaggctcctgccaccacgcccggctaattttttgtatttttagtagtcacggggtttcactgtgttagccaaatccgcccgcctcggcctcccaaagtgctgggattacaggcgtgagccaccgcgcccggccctccatccttcttttcttagacaaattggttaaacacgcagcccggcaggaaaaagtaactttctctcctctgctcgttgtcttccgtttcgagtccactgagcacaccggcagcagtttccttccagccactttcttgcgcatcaacaggtacagggcagcgaattgaccaccacgaggcaggcagccaggagcggggcacgcccttccttcaggaggcagcgtttcctgtgaaagcaatcactcagtctggaaaaatgccaatgccttcagttctctttcaagttcattaaggctctaccaattgttctcatccagattccttctatgttaaggaaaaacaaaacgaaagctaagtacctgaaggataaaccagtcttacaagtgtcaggaaattttacgtgtttttgtttaacaaactaaacaaaatccaggaatccaatagcattttgaaatctccaaataattacagaatttatgttttaaacgtcagtttatgttaggtggaacccacgtttgactcttatttttaatacgcttattaaatggctttctttttgacaggctagtgcgattccaggtggatgtagggctcacctgtatagacaaggtgaaacatctgaatttggtggttttggaaatgtcacagtccgttggtgtggctataaaagaatacttgaggccaggcgcggtggctcacgcctgtaatcccagcactctgggaggccgaggcgggcggatcacgaggtcaggagatcgagacgatcctggccaacacggtgaaaccccgtctctattaaaaatacaaaaaattagccaggcgtggtggtggccgcctgtagtcccagctactcgggaggctgaggcgggagaatggcgtgaacctgggaggcggagcttccagtgagccgagaccacgccactgcactccagcctgggcgacagagggagactccgtttcggaaaagaaaaaaaataaaaaagaaaacttgacgctggataattttaaaagaggcttatttggcacatggttctgcaggctgtacaagaagcatgccaccagcatctgcctctggtgaggcctcaggaaacttccactggtggtgaaggggaaggacagctggattctgcccatcaggggaaggggtggggaggatggcaggaggagggggatgagatccggaagggagacggggaggggccaggttcattctaacaaccaggtgtcatggggaactaagattgacaactcctgggggaatgtgggagggggcggttatggcaccaagcctttcatgagggatccaccccaaaccccaacaggccccaccagctacattacggttcagatttcaacgtgagccctggcagggacaaaggacccgtagcagacaccaaggccttctgccatcccacaggaccctctcatcccaccatccctcagccttcttcctgtgcatttataggcaccttaacttttaaaattctgactgaagaacaaatcgcattggatgttttctatcagtacatgcaagtatctcattctttttaacagcatcataatatttagtgcatgggtgaaacacatggcgtgaaccacagttaattttaatcttccatcccatgggcaattgttaacattatgtcctgcttttgttttttctaattccagcagcattgtagtgagaacccttgtatgtgtcatatgtccatatgtcaatgttccctgaagtatcgggcagccctttagaagaggaatttttaggtacatgagctcatcaatgtagaattttgtttggatattgctaaattgtacttcgggagaagattgtgccagttttactctcacaccaagaatacaaaagtgtggccgggtgcggtggctaacgcctgtaatcccagcactttgggaggccgagacaggtggatcacgaggtcaggagatccagaccatcctggctaacacggtgaaaccccgtctctactaaaaattgaaaaaaattagccaggcacggtggcgggcgcctgtagtcccagctactcgggaggctgaggcaggagaatggcgtgaacccgggaggcagagcttgcagtgagccgagatctcgccactgcactccagcctgggcgactgagcgagactccgtttcaagaaaaaaaaaaaagaatacacaagcgtgcccgtgtccctgcacccttactacatggaactttcattctttgctactctaagaggtaaaaaatgatagacctcaatgttgtattttttgtttcagtgttattagagattttcaaggatccaggaattttttgagactgggagtagatgacctagagactccagattagaccgttggggagggagcagggaagactgcagtcgcacctctgcacttaggaaactgtggtcggctggggccagttcctgccacccgccatgcctgtgaatggagataatgtctctgtcctcagactgtcaggatgacatcagatgagcctggagctgagctcagtttctcaccccaggtcctggctctgtcaatgctggactggcccaatctctgtgccaggtccttccacctcgtctcgtctctctctttatcaaagtaggaaatgagaaattctgatggctctgaagcttagacactcaggctatcagagcccagagattggaggctgaagacagccagggttggccgtgctcctcttcagctctgtgactctgctgtggccccagctccttcctataaactaggtggatataaaagtctgcagcggccctgtgtaaaccacagtggtctgtgttggcagatgtgtgctgtcgtgtgggaggacaaatcacatgctcagggctggtgtcagtcactcaggactctggatccccagagcacctgtcctctacccagcagaggctgcacctgctcccacctgcacctccatactggctctctgagcttggggcagaaggttctaaggaatggggtggagcgccatggggaggggccgtggaggaacagaggagccagacttcaagttaggacaaagatgtcactgcagggccacagcctggcttacctgccacgtttccttccagttgtccttctggtgggcacccggcactggttgcagtttgaagagtgagcaggaaaggtctccatccatgtggctgcagatggctgctcacccagcccctactgagaggcaacagtcccagttctggtcctctgtcctgtatccaggagtgacagggcagcaaggctttagcttccaggtcggagatggggacagtgccatgccctgagcctgtgctgttgggcagttggtgtcacttagtctggaaaaatgccagtgccttcagttctctttcaagttcattaggacaggtgccctggggatccagagtcatgagtgactgacaccagccctgagcatgtgatttgtcctcctacacggcagcacacatctgccaacacagaccactgtggtttataaagggccgctgcagattttatatctgcctagtttataggaaggagctggggccacagcagagtcacagctgaagaggagcacggccaaccctggcagtcttcagcctccaatctctgggctctttgatagcctgagtgtctaagcttcagagccttcagaatttctcaatttctactttgctaaagagagaggtgaggtggaaggacctggcatagagattgggccagcccagccagagactgcacatcttcattcagggtattttcctaacccagggatgtggggattgttgctctcattttgtctggggagaaaatgagatttaggaggaggaagtccccagcatttgggacctggcctgcttgataatagcagctgcctgttggactgggaagggcctcttccggattcccaggcaggtatctgtgataatggggaaaggagaaagggtctgctttgtagggaagagcagggtgcactcggcacctcagacactcgcctgtggccaggaggggatgtgaatcatcacattttacagaggagaggaccaaagctcagagagggaaagtgtgtgcagctcagagggggaacgtgtgtgcacctggccacaggcaagtctgtccagagcactggtaggaatgagagaaactaggaatgaccactttaaaaacttagatgaagagaatctcaaagttaagtcattggagtttgttggtaatatatttgtgtggcttaggtcatgttaagtgcatcacaccctcgcccccatgtctgctgttggtctcagcactgggtggagggagcggggacagtcctgatgaagaggagaggggagcagcaccggctggggtggggcctctgccgctgcctcttcctgtgtggtttttcagggcttaggctgcgcctctcacctggcttgtctgtggggaggagatctttgttctctggctgcttttaagattttctccttaacagtgtggtttcagcacttcgatggtggcaaaaataatctgccggagccatgtctgtagcatttttggtctccccttctgtataatagcagccgtgttttggcttctgcagggctaaagtcctctgagcagctgcttctccacatctctgccctgcacttggcctctgggagctcctagggttccttagcagagtccacaggactcttcggggtcccatccctgtgctgtagcctggaacctgtgacctgaggcggtgagctgaggccaccactgggctcacctcatgggcttggagggaaagtcactcacccaggaagtaggtgatgagcactttactctgagaatgtctgcgcctggtggtggtgggaggacaaatgagccctgtgtcagtcctgctccctgaagcccacagtctggtggaggaggtgtcactagggacctaaataactatcaggaagcatgggggccacctcccccaccccccacctccagagaggctgtgccggctccagggatgccatccctccctacttgactccagcagttgcaaggccccaggtcatggtattggtggcttagaggatgtggtttcattaaaatcaacattgaggggaatgattgtactaacaacagcatgtgctgaaatacagtacttgcgtgtgccaagctctgttcttagcacttcatatgtaaatgaacacacttaatcctcatacaaccagactgtacaggaaccctcattgtctttgttttagacaaacagcatgagactcagaacatttgttcagtagaggggctgggcaggaggatgagcaaccctcggggcagcagcagtgattgggtcactgggttctgctgacctttcccaggggagtatttggtgctttttcatgaggcctgcattcacccagcgctgggtcactgctgggggtacctgagaagtcatgtaaagccacctcttatttccagaatgatagacatgtttagagaagaagtggcttcccccagaccatgaggctggcccgagactacaagacagatggcttgcttcttaacccaggggtctttttataccaaaagaacaaagaaataaaaaagccacgaaagactcaaaggaagcagattttcgaccacagccaacctcagaacaattctgagttgctcattttaagatcaataaggcatttttttagggtgtgtatgcctgagagaggaaatcagtgtgaatatcaaacttacctctgaaacagcctaacacaatgctaatccgagaggaacaaggcaaggaaaccccctggtgaatgactcatctcaggaagaggcagggcagggtcaggagagtctatggaggagaagacctggaacaagacctctctctcttgctctctttctctctctccctctctctctctcacacacacaaacacacacacaacctcacacccccatgagcccaaatctgtgaactgagaacctcacttctctgacctcaccttccatctcccttaatcagacgcccacaaacctcagagttgtgtcccagcatcacttgttttgactgccctccccgactgccttgacttcgtatctgcctaggaacctgcctgtgtggacttttccctctatgtggacctttccctctatgtctaccggtgtccctgccaccagtggcatttgtcacctctgcctgggcagcccctcgtgactcgggttattgatggctgtgcctcatctccctgggaactggaactgtcctaaggaaagggagggtcgtgcctttttcttgataccccacgattccttgcacagcgtttctaccaggcgccgacatgccctccttggatgaatgagtaacatgggttctaggaagcccgcaccaatgcagatgtgacgtcctcagcctttcatagacatgtttcatgtgagaggtgggaagaacagctgaacagaaggctgagcactgtccaggtccagagtcaccaggagctcgttgtcaggttttcacttgctattagtagagatttttttttaaggtactatttttagtgttagaagtgaattcaggccgggcgcagtggctcacccctgtaatcccagcacttcgggaggctgaggtgggcagatcacgaggtcaaggagatcgagaccatcctgaccaacatggtgaaaccccatctctactaaaaatacaaaaattagctgggtgtggtggcatttgcctgtaatctcagctactggggagggctgaggcaggagaatcacttgaaccagggattcggaggttgcagtgagcagagattgtgccactgcactccagcctggcaacagagcaagactccgtctcaaaaaagaaaaaaaaaatgaattcatcagaaggcataataatcataaatgtgtatatgtctaatagtagagctttaaaataaatgaagcaacgctcaaaaggattaaagggagatcatgtcacccccttctcagcaactgatagaacgatcagatgaaaacagtaaaataacagatctgaacattgtcaaccaccttgacttaactgacatttatagagcatatatgcaacatctatgggagattccttctcttctatgaacatggtacttcaccaagatagaccacattgtgaactataaaacaaatctaaatacatttaaaacaaaataatataaaatatgttctctgatctcaatgaaattaaagtgttaagcaataacaatatctagaaggactccaaaaatgtgaatattaagcaacatacttataaataactcatagttcacgaatgaaatcaaagagaattcaaaatatttcttttttttttttttgaattggcttcttgctctgtcgcctaggctggaatgcagtggcgtgatcccggttcactgcaacctctgcctcccgggttcaagtgattctcctgtctcagcctcccgagtagctgggactataggcacctgccagcacgcccggctcatttttgtatttttagtacagatagggtttcaccatgttgcacaggctggtcttgaactcctgacctcgtgatccacccacctcggcctcccaaagtgctgggattacaggcgtgagccaccgtgcctggcctggagtttcttttggggatgatgatgaaaatcttcaaaaattgattttattgatggttatacacttctataaatatatttaaaggaaagaattacatcatatataaagtatatctcagtaaagttcttaaggattaaaagaagaatggtatcaaaatcaatgactcagaggtgtgcattacttacccgtaaaataagtataaattaaactcaaaggtagtaacaacatgacaaggaaataataagactgaaatcaatgaaatagaattcaaacaataaaaggaatcaacaagctaagagttggttctcagaaatgatcaacaaaattaataaaagtaataaactggccggacgagatggctcatccctgtaatcccagcactttgggaggccgaggcaggcgattcacctgaggtctggagtttgagaccagccggaccaacatggagaaaccccatctctactaaaaatacaaaattagccaggcgtggtggcacatgcctgtaatcccagctactccggaggctgaggcaggagaatcgcttgaacccaggagaccgaggttgcagtgagccgagatcacgccactgcactccagcctgggcaacaagagtaaaactccatctcaggaaaaaaaaaaaaaagtaataaaccaaactttaaaagaaaaaaagaacaacagcatgaaataccaatatcaagaattaatgatgggatgttattacaaactctacagccattaaaaggaaaatagtgggatcttatgaataactttatgccaatcaatttgacaacttggattaaatagacaaatttcttaaaaaacactacttagcaaaatagccacaagaaataaagataatttaaatattcctaaagctgtctatgaattggaattcattgtttgttttgtttgtttatttatttatttatttatttagttatgctattttttgagtcggagtctcgctctgtcatgcaggccggggtgcagtggtgcaatctcagctcactggaacctccgcctcctgggttcaagtgattctcctgcctcagcctctggagtagctgggattacaggtgcccaccaccacgcccagcatatttttagtagagacggggtttcaccatgttggccaggctggtcttgaactcctgacctcaggtggtcgcccactttggcctcccaaagtgctgggattacaggcgtgagccacggcgcccggcccccctgctcttccttttctaatttaactttctaatttaaaaaatctcccaattacagaaaagatgcaaaaattatactataccctttactttgaaccacctgagagcaagctacccacagaacgcacatcacccttatacacttgagtggatatttccaacaaataaggacattctcccgtataaccacaatacaatcctcaatatcagacagtaagcatcagtacattactaccagctaatcctcagaccccaatggttttcacttgtctttataatgtaatttattgcacagaaatcctgtcctgaataactatactgctctttcatctttttctgactctagtatttcatgggacattggcaggctgttttgggggacagtttgtaaagtgcctttttaaacctgaagttcattatttaatatttgattcagtatcctgctttttaaaaaatttacacatcacctaaccctcattagtaaaagcgtgtgtatgtctgtgtgtatgtgaacactgcccaatcacaggagaatatccatttttctcaagggtacatgaaacattctccaggacacactatatgttaggccacaaaacaagtcttaatacaattttaaaaattgaaataaaacaaactatcttttccaatcacaataaaaggaaattataaatcaatagcagaaggaaaactggagaatccacaaatatgtgaaaattaaacaacacttttttgctgttttttttttttgagacagtctggctctgtcgtccaggctggagtgcagtggcacaatctcggctcactgcaagctccgtctctcaggttcacgccattctcctgcctcagcctcccgtgtagctgggactacaggcacccgccaccacgcccggttaattttttgtattttttaatagagacgggttttcaccgtgttagccaggatggtctcgatctcctgacttcgtgatctgcctgcctcggcctcccaaagtgctgggattacaggcatgagccactgcgcccggcctaaacaacacattttaaaacaaccaatgggtaaaaaaataaatgaaaagggaaattagaaaatgtcttgggaggctgagctctgtagctcacgcctataatcccagcactttgggaggccaaggtgggcagattgtgggaggccccacccccctcaaaaaagaaagaaaatatcttgagacagatgacaggcacactaaaatctcagaactcaccactaaagaacttatccatgtaacaacaacaacaacaaaaagcagctgtaccctcaaacctatggaaattagaaaaatgtttcaaaagaaaatatcttgagacaaatgaaaacaatataccataagttacaggatatgaaagcagtgttataatggaaaatgatagctgtaaatgctcaccacattaaaagaagaaataaatgaacaatctaccttttacataatgaagtagaaaatgaagagcaaacagctgggcgtggtggctcacgcttgtaatcccaacactttgggaggccgaggtggacggatcacgaggtcaggagatagagaccatcctaacacagtgaaactctgtctctaataaaaatacaaaaaacgtagctgggcatggtggcgggcgcctgtagtcccagctactcgggaggctgaggcaggagaatggcatgaacctgggaagcggagcttgcagtgagccaagatcgcaccactgcactccagcctgggcaacagagcgagactctgtctcaaaaaaaaaaaaaaaaaaaaaaaaaaaaagaggagcaaactaagcccaaaccagcaaaaaatagatcagagataacagaaatagagaatagaaaaactgcagagaaactcaaagaaactgaaagttgacccttaagagagatctataaaatgtacaaacctttacttagatggactaagaaaaaagacagaaaacttaaataaccaaaaccagaaatgaaagaggggacatttaaaacaactttacagaaatccaaaggattataaaaaatactataaataattgcatgtcaacaaactagagcacattgataaaactggtaaattactaaaaacacactacctaccaatattcaatcatgaagaaatagagattttgaacagaactatagtaaggagatagaatccataatccaaaacttcccagcaaagaaaagcccaggaccagttggcttcaatgatgacgtctaccaaacatttaaagaactaacatgaattctcaaattcttccaagaaactgagttggagggaacactttctaactcttcgtgtgggccccgcattaccctgataatatagaagtgatgaaaggaggcctccatgtcttgttcctgatcttggagaaaaaacctttagtctttcactattgagtaggatggtagctgttggcttttcatatgtggcctccaaatgtaagatctataagaattatacaactcttgtaagaaaacagcaattttaccttggggtatatatccaaaagaattgaaagaaagggcataaagagattttgtacacccgtgttcatagcagctttattcacaatagctaaaatgtgaacacaaaccaagtgcccattgacagatgaatggataaacgtaatacatatacacacaatggaaaggaatgaaattccaatgcatggtaccgaatggatggatcgtgatgattttatgctaattgaaatatgacagcctcaagaaaaccataaaatactgtatgtctccatttatatgaagtatgtagagtagttaaattcatagaaacagacagtagaatggtagttgccacaggctgggggcatggggacaaagagacaaagatgagcacaaacaaatggttgagttttagaactgggagaaagatgcaagttctgtctaattttggaggcttgggggaatggaatgtgagattgatcttgtaatgggtgagatctggaagccactcatgccagtccctgctttgtccccacaggtcgtacctagctcagctgcaaccatcaaacttcatgatcaatcaattggcacacagcaatgggaacatagccctttgggagagttgtgtccaccaggtacattctaagactgatctctaatcctttacacctctcttttccttaccctatactatatacaaaaattatctcaaaattcatcaataacattccttttccatgttcttcaagttttctgtttcctacagtttctggttcttctattcaacagatacttattgatcctttgccaaatccaaggttatgaagctttatccccatgttttctcctaagagttttgtactttaactcttgatgcattttcagttaatttttgtaaatggcatcagataagcgtccaactgcattcttttgcatgtggctatccagttgccattcgttgaaatgatgatttttcccattaaatggccttggcatccttgtcaaaaaccaattgaccataaaggtatgggtgtatttttggactctcaattcttttccattgatctatatctgtcctctttccagtgccacacagtcttgtagtgagttttgacatcaggaagtatgaatctttcttttttgttttccttttccagaattattttgtttatgctgggctttttgaaattccatattaattttaggatcagcttgccaatttctaaaatcagctgagtttctcacagggattgtgttgcacctgttgctcagtttagaggttcctggcatcttaacaatgagaagtcttttgatcccaaagcatgagtttttttgatttatttaaatcatctctaatttttaaaataatgtttcgtagtttgcagactataaattttgggttgattttgttaaacttattcctagatatttaatacttttttatgctattgtggataaaaccttttcttaatttcattttaggattcattgtgagtgtatacaaatataattgatttttgtacattgatcttgtattctataaccttgcagaacttgtttgttattcttaatgtttttataatggcttccttaggatttcctctatataagaaaatataatttgcaaatagagaaagttttaccttttcttttccaatctggatgctttttatttctttttcttacctaattgtcctggctagagcctccagtaccatattgaataaaagtagtgaaaacagatatcttttttggagaacatctttcagttgttcaccattaaatataatgttagctgtgggtttttgtagatattctttatcaggttgaggaagttcacttttattcctagattattttgtgatttttatcatgaaagggtgttggagttagtaaaatgctttctctgtgtttttgagataatcatgtgacttttggttttcattctattgatataatttgttacatcaatttattttgggatgttgaaccaacctttcattcctaggataaaacttatttggtcctggtatataattcttttttgttttgttttgttttttgtttttgagatggagtctcactctgttgcccaggctggagtgcagtggcgcgatctcggctcactgcaagctctgcctcccgggttcacaccattctcctgcctcagccttccaagtagcagggactacaggcgcctgccaccacgcccagctaattttttgtattttttagtagagacggggtttcaccgtgttaaccaggatggtctagatctcctgaccttgtgatctgcctgcctcagccttccaaagtgctgggattacagtcgtgagccaccgtgcccagcctataattctttttgtatgcttgtggattcaacttgctagtattttgttgcaaatttttgcaacaatattcataagaatcgttagtctgtagttttctttctttatgaggtccttttctggtcttcatattaagctaattgtattagtccgtttatatggtgctgataaagacatacccaaagctggcaatttacaaaagaaagaggtttaattggacttaacagttccatgtggctgcagaagcctcacaatcatggcagaagacaaggaagagcaagtcacatcttacttggatggcagcaagcaaagagcttgtacaggaaaactccaccttataataaccatcagatatcatgagacttactcactataatgagaacagcatgggaaagacctgcccctgtgattcagatatctcccaccaggtccctcccacaacatgtgggaattcaacatgaaatttgagtgagaatgtatccaaaccctatcacccctggcccctcccacatctcatgtcctcacatttcaaaaccaatcatgccttcccaacagtcccccaaagtcttaactcatttcagcattagctcggaagttcaccgtccaaagtctcatgtgagacaaagcaagtcccttctgcctatgagcctataaaatcaaaagcaagttagttacttcctagatataatgggggtacaggcattggataaatacatccattccaaatgggtgacattgtcgaaaacaaagggctacaggccccatgcatgtttgaaatccagcagggcagtcagatcttaaagctccaaaatgatctcgtttgactccttgtcttacatccaggtcacactgatgcaagaggcgggttcccatagtcttgggcagctccgcccctgtggcattgcaaggtatagcgcccctcctggctggtttcacgtgccggtgttgagtgtctgcagcttttctaggtgcacggtgtataagttatcagcagttctaccattctggggtctgaaggacaatggccctcttttcacagctccactaggcagtgccccagtagggactccgtgtgggggctctgatgccacatttcccttccacactgccctagcagaggttctccatgagggccctgcccctacagcaaacttttgcctgggcatccaggcgttttcatacatcttctgaaatctacgtggaggttcccaaacctcaattcttgacttctgtgcacctgcaggcttaacaccatgtgggagctgccaaggcttggggcttccacctctgaagcaacagcccaagctgtaccttggccccttttagtcacagctggagtggctggaatgtagggcaccaagtccctagactccacacagcacaagaccctggactcctaccaggaaactattttctcctaggccttcgggcctgtgatgggaggggctgccatgatgacctctaacatgccctggagacattttccccattgtcttggggattaacactcagctcctcattacttatgcaaatttatgcagccatctttaatttctcctcagaaaatgggttttcttttctagcacattgtcaggttgcagattttccaaactttaatgctctggttcccttataaaactgaatgccggccaggcgcggtggctcatgcgtgtaatcccagcactttgggaggccaaggcaggtggatcatgaggtcaggagattgagaccatcctggcgaacacggtgaaaccccgtctctactaaaaatacaaaaaaattagccaggcatggtggtgggtgcctgtagtcccagctactcaggaggctgaggcaggagaatggtgtgaacccaggaggcggacttgcagtgagccgagatcatgccactgcactccagcctgggcaacagagcaagactctgtctcaaaaacaaaaaacaaaacaaaacaaaaaaagaattatataccaggaccaagtaagttttatcctaggaatgcaacattggttaaaaacaaagaaacaaacaaataaacaaaaaaactgaatgccttttacagcactcaagtcaccccttgaatgcattgctgcctagaaatttcttctgccacataccctaaatcacctcttcccagttcaaagctccacagatctctagggaagggacaaaatgccaccactctctttgctttctttgctaaaatataacaagagtcacctttgctccagttcccaataagttcctcatctccatctgagatcatctcagcctggactttattgtccatatcactattaggcttttggtcaaagccattcaacaagtctctaggaagttccacactttcccacattttcctatcttcgtctgagccctccaaactgttccaacctctgcctgttatgcagttccaaagttgcttccatattttcaggtatcttttcagcagctccccactctactggtaccaatttactgtattagtttttttttttttttttcgtgctgctgatgaagacattcccaagactgggcaatttacaaagaaagaggtttaattgaacttacagttctacgtggctggggaagtcttacaataatgatggaaggcaaggaggagcaagtcatgtcttacatggatggcagcaagcaaagagagcttgtgcaggaaaactcccccttataataaccatcagatcttatgagacttactcattatcatgagaactgcaagggaaagacctgccccacatgattcaattacctcccattggatccctcccacaacttacgggaattcaagatgagatttgtgtggggacacagccaaatcatatcagtaatattgtccttatacaatgaattggaaagtgctccttcctctgctgtctttaaaaagggtttctgaataattggtattaattcttcttgaaatggttggtatcattcagtggtaaaggcatctgggcctcaactttgtttttctggtgaaaacatatacatgtatttagaattagccagctggattcagtttagatgatcccaattttgttggcaacatccaagacatggtaatcaggagccagtcgaacatatgccttcttctctccatcaggcctaatcagggtgttgaaccttggccacataaacatcatagagcttcttcacaacctgtttgatctggtgcttgttggttttaacatctacaatgaacacaagtgtgttgttgtcgtcttctatcttcttcatggcatactcagtggtcagtggaagcttgatgatagcatagtggtcaagcttgtttctcctgggggtgctctccagagtctcagtatcttgggccaccggaaggtgggtgatgtatggatattctttttttcatggcagtggacacctttctacactgccttcttggccttcaaaacctttgcatcgcttcagctttaggaggggcaggagcttccttctttgctttcagtgccatcttgtgaaaacgacttttctttaggagtagttttgataactaagtcaaaatctttacttgctatatgtctattcacattgtctctttcatcttgattcagtttcagtagtttgtgtctttctaggaatttgcccctttcatccaaggtacctaattttttgttgtacaggtttcatagtattcttttataatttttttatttctatataatctgtagtaatgtgctctctctcatttctgattctaatacagtcatgcctcagttaatgatgggaactcattctgacaagtgcatcattgtgcaaacatcatagagtgtacctccacaaacctagatgatatagcctactgcatccctaggctatgtgatatagcctattgctcttagattacaaacctgtactagtagacaattgtaacacaatgataagtatttgagttcctaaacatgtgaacatagaaaaggcccaataaaaatatggtataaaaggttaaaaaagatgatgtagttgtctagggcacttaccatgaatggagcttgcaggactggatcttgtctgggtgagtcagtgagtggtgagtgaatgtgaaggcctgggacattcctgtacactactatggactttataaacactgtacatttaggctacaccaaatctgtaaatttttttttccttccttcaatattaacttcgtgtaactattttactttataaactttttaatttttaaaactttttcactcgttttaacacttagcttaaaaaacaaaaactgtacagctgtacaaaaaatgttctttctttatattcgtattctataaacatttttgtatttttaacttaaacttttttttacttaaaaatttttttgttaaaaactaagatagaaacacagacattggccgggcgcagtggctcacacctgtaatcccagcactttgggaggccaaggcaggcggatcacgaggtcaggagatcgagaccatcctggctaacacagtgaaaccctgtctctactaaaaatacaaaaaattagctgggcatggtggcaggcacctgtagtcccagctactcgggaggctgaggctgaggcaggataatcgcttgaacctgagaggcagaggttgtagtgagctgagattgcgccactgcactccagcctgggtgacggagtgtgactccttctcaaaaaaaaaaaaaaaaagaaacacagacattaacctaggtctacacaaggacaggttcatcaacatcactgtctttcacctccacatcttgtcgcgttggaggatcttcaggggcagacacacatggagctgtcaactcctatgtcctctgataacaatgccttcttctggaaaactgcatgaggctgttttatagttaccttttttatttgtaagtaggagtacactctaaaataacattacaatgtatagtatcaaaaatacataaatcagtaagtcatttattatcattatcaaatattatatatagaacttcattatatgtgctatacttttaactggcagtgaagtaggtttgtttacatcagcattaccacaaacacctgagtaacgcattgacttatgacattactaagcgataggaattttcctcctccattataatattatgggaccaccgtcacatatgtggttcattgttgaccgaaacgtcatcatgcagtgcgtgactataatttgagtcttattttttccctgtgctaattttttaacacaattagttgtgccaatatatcgatctatttaaagaactagattttgagttcattaatttactctgttgtttttctgttctccgtctcattaatttctgctctaatctgtattattttcttccttctgcttgctttatctatagtttgctcttctttttcgagtgtcttagagtggattattaggttatagattgagatatttcttcttccttaatagacatttaggaaggatatttcttcttccttaatagacaatttctctgtaaacttcagctacgttagctgtatcccataggttttggtatgttgtgtcttcattttcattcgtcttattttctgatttctcttttgatttctttttagaccagttggttatttaggagtgtgctatttaatttttatatagctgtgatgttccccagtttcttcctgctattgatttctaattttattccattgtggtaggagagtgtattttgtattatctctatccttttaagtgtattgaggtttatcttatggccaagcatatggtttattttggagaatgttctatgtgcactttaaaagaatgtgtatcttgttttgattgagtagagtgttttatagacatctgtccagtctagttgttaatagtgttgttcaagtctactactttcttgttgatgttctttctagatttttttggtatgaattcctataggttaaggaaactatgctttgcagtgtggttttcattgcaagtattttctcctactttgttttcatcttagtcaagatttcttccatgcagttttcttcctaattttcatatagttaactttatgcaactttttagtttctcgtgagactgagaaggtcctttctctctccaaacttgtaagaaaaatttctcatgcagtacttgtgtgatttcatactttacagttgacaccttgatagacctagtctctatttccttatagggagagcataagcaagaagctttattatttttcagcagtaaccttagttgccccagcgccattactgaataatcatatttttatcatcgatagtgtcatcatcataacacatcagcaaggaagtttttccttcacagtggcacggtggctcactcctgtaatcccagcactttgggaggccgaggcaggtggatcatgaggtcaggagatcgagaccatcctggtgaaacctagtgaaaccccgtctctactaaaaatacaaaaaattagccaggcgtggtggcacgctcctgtagtcccagctactcgggaggctgaggcaggagaatcgcttgaacccaggaggcggaggttacagtgagccaagatcacgccactgaactccagcctggtgagagagcgagactccatctcaaaaaaaaaaaaaagcctttattatttttcagtagtaaccttagttgccccagcactattactcaataaccacatttttataattggtagtgtcgtcatcgtaacacattatcaaggaagttttttttccacagtttgggttttctaagagtatctttcaatatcagtaaatatgaatcagaggagagggataaataaatgggcactgaaaggggagagtgaggtcacctgaaggggcgaagccctggaggtgaaggtcgagcctccagacatgggctcccgctggcgacagctcctgcaggctgtcacctcagtgcctggagaccctctgcaatccagggcagcatgaggtaggccttctttctgtggatcattctttgactctgtatagggaggaccctttttccttccattttcctcccatggcaggtggcatgggctgtatctgaagccttcccctcatcgctgtattgtttctgcgcctgtttgtaccttctactgaccaagagctcactgagggcagggattaggactttttgtgagtttccagggatgcaggtggcattgccctggtctctaggcctatgtggccattaatcacttaaaacacagccactttgaattgagatgtgcagtgagtgaaaaatacactctgggtttcgaacacttagtattcaaaataaaagaaaatatctcaatgttttatcttgtttacatgttgaaatgctaatgttttggatattttaggtccaaaaagtacattgttaaaattaatttgacctcattctctttttactattttaatatggctctcatagaatttgaattttgcatgtggtttgtattgtatttctgtcagcagcgccagtcagaggtgtgtatagatgcagaattgacgacaagaccaagccaagaagatgggatttctctgtctggggtctactgatggccaaaagaagagtttcctagccaccgccacgatcctctgggaactctgtggcaattcattcattggcttttctctcccttcccaggatctcatagatcagaacatcctggagcctgtaaccggtgcacagagggtgtgggttacaccaatgcttccaacaatttgtttgcttgcctcccatgtacagcttgtaaatcaggtacagaatgtgtggacctcttgtccagaggtggagtgaggggcagtgaggtgggagtggtagccaatgtgagtcagggaaccaagttccagcccaacttggtcttcatcataccctgttccatggttatgtcttaggtccataaaatgaaacagaaagaaatcatttttataatgcatgccacctggtagtgcaaactatcagctccaagagggtaggggcatcattacagcacaaagaaggcctggctgagtggacagggctgagtttcagcggtggtacgggtctgctctggggccacgctccccctgggctgtgtgctcctggcaggttctcaggctcactcagccttcagtttctcaggcgcctccctcttcctcagcaggctgggtttttgggaagtcacccaagggctcctcttcttgcagactctctcacataccatgtgcctcctttgctactgaccatgcgatctaaatggtgctttttccctaatctgatgtaataaataatgaatcatggtccttttgtatgactccaagtgttggtgacagctgaagggtgggtgtcctgtgtgagcccgagtgtgctggtgcagaatctggccctcagaactccttggcaaactgagttgagctgagctgagggggagggagttggggtggtgaggaaaggtcaagggacacgtcagggaaacacattcccaaaaccttgtactctgtcatcagatgaagaagagagaagtccctgcaccacgaccaggaacacagcatgtcagtgcaaaccaggaactttccggaatgacaattctgctgagatgtgccggaagtgcagcagagggtgagacaacagccaaggggctcccagcagcctcaaagaacccacagaagcaaggaaccctaaaaagacccgagtctccttgtacccgtatctatcagccctgaccccatggtgcctccacccccataggtgtccctgagcctgtggcgtctcctgagcctgcaacctgcccctcctggtccatctgcctgtccccacccctgtcccctgcagtggccccttctcacccctccccagcactagtccccttggccaggctgacttgttcactaggcacaggaggccatgacttagggcccacaacagaggtacatgaaatattttatcttgaaatcataagaaaataatggtatagaatccagctggggttatatttatatttaaacaaattgagtcataaaatgtaatttttaatatttgcttttaattcaagaagacagaaatgcccacagcccgcaaaaatcataataaggccatgggtggagctccttcaagttcccatgaggacctgagcccacccagccagcctcacccctggcccctgatttctcaataagtcctgtctttttcctattttggttttggaagcaaagagtaattgctcttctctggtcctccagtgtttgctgtgattgagaggaaccagcagacaggtgggggcgagggctcacttgtactgtgggttaactggaggaaggggctcagcttgtggccacacgggcttgtgatcttcccctggagtgtgattcctcctaacgcaggcctcccctgcagcccagggaagattagtgtgtgcccagcacagaaggctcctggaactgcagctctgaccccagagcagggaggccaagggggtaaagtgtgcatgctcagacccttccccagcctaaacaagggagcatagggggaccccctgcagatacgaggagactatccttcccctgacgccttctcagggacattgggcagggagagtggctcctctttcatcccacctggccagctttccatcaagagtcccccccctccctccctgtgtgtacccaggtgccccagagggatggtcaaggtcaaggattgtacgccctggagtgacatcgagtgtgtccacaaagaatcaggtacaaagcccactggggaagccccagctgcagaggagacagggaccagcagcccgagactcctgtcttttcctgtcttttctcaggcaatggacataatatatgggtgattttggttgtgactttggttgttccgttgctgttggtggctgtgctgattgtctgttgttgcatcggctcaggtaggtgctggctgagggcaagggctctgggcactctctgccctgccttcttctgttcccacagacagaaacgctcacccctgccccaagtcctagtgtctctggccgggctctatcttcctccttgtgatcaccccccatcctcccatcctgtgcaaccctagggccctggtgtcatccgtccctctcccaaggctgggggtcccctcatctcccagccaagtctgggaaggcagggccagttcctccactggtcaggcccatccaggcagggggcagtcagctcctcaactggatgacaagagtcgagacgagaagtggttgtgggatttatgtagctttgttcagagcaaaacacagagcagaaaacagtgatgttccacttgtttgtttttagcctacttccctttatgctccccgctcctgaaggatctcccgagttagcagggcctcatgtggatccccaggcccggggatctttgtccagtgtcccagcccccagcccacccctgcccaacactgccctctaagaaggagtgctgcatgggcccctccctggccactaagggaaccgtcttctcttctaggttgtggaggggaccccaagtgcatggacagggtgagttgatttctccaggagctgggggcatcaggggctcaggaactgcttcttgcccacagtgtagtccaggtgggtgggtccccgtgctctcatggctgccctgagtctctgaagtggcctggatgctgtgcattgactatgggggacacaggcccttttgagcatcatacaggctggtgggccattctgtagccctgtgcttcctacagcccaggtgagacccttaccccacagcctgtaccctggggatggggtgagcccccaagcccagcaccagggcctggccccagcagcaggtcctggatgtgctgagcatggacttcctggagtgacctcactgggagggggtggtggcagcaggtccagccgtgccctacggaccccgtggggagccctgggtgtgggcttctgagttggctctttgccttcctaaggtgtgtttctggcgcttgggtctcctacgagggcctggggctgaggacaatgctcacaacgagattctgagcaacgcagactcgctgtccactttcgtctctgagcagcaaatggaaagccaggagccggcagatttgacaggtgtcactgtacagtccccaggggaggcacagtgtctgctggtgagttggggacaggcccctccaagaccttgtaggcagggggtgaaggccatgcctcggctctcctggtcaaaggggaagtggagcctgagggagatgggactgcaggggacggggctgcgtgggaaaaagcagccaccctcacaaggggacaggcactcttccaaatgtctgcttcttagtccctgtcctgtccttgccatgtcctcagaaactggagctccagaggaatagagtgggggtcacagggtttgttgatgactgaataaggctgcacggtctccactgtgtgctcctacagaagttagggagcccttgctcataacagcagggattttaaatttactctgaaattattattgcattaaacatatttggatctaaatctctgcccaaatttctgcatatggttgtatggaggattccaagaagaagcacaatttccaagtcagcctgtaacagtgctgcttactgtgtacacgcacatacacgcacatgcacacacatgcatgtacacacatgcacacacacatgcacgtacccacacatacaggtacacacatgcacacagccccctagtgttggtttgtaccagttcatgtattttgatttgacattgaagggctttttcttttctttttttttcttttttttgctatttaggaaaacattgttttaaacgaacatttctttgttttcactgtttttgcgtaagatcagtgtcttgtctctcagagtctttatgagaaggcctgctctcctactcatgctttttctcacattcagacagtagattcctaatttcttcttgcccctttttgttctaatattttcaggtgtagaagctttaatttttaaccagtgaaatctgtagatacttttaccttttcattgctcactactgtagaaagaccttttgccaacacaagacgaactcctctaacttcttatggagatatttttttcaatgatgtgatttttgcatataactttataatctaaatggaacttgttttgtgtttcagtgcaaagcgaggcactccctgaattgttctagtcactgtctggtttttccaacccctttgagctgccgattctcccatttccctctgctttgggtccctccttaatcacaggttaaatgctcatctagacaatgatctccttccacctagactgttccattcagttcctttcttgcattagtacccatttattctaaccaaaaatgtaattaaaaaaaaaagaaggcaaacattaaaaaggtcaataatctccagcttgataaggtgctttgacatgaacaaatagtttatatatttaaaatgagaaaatttaaactatcaaaaggtactcagtaagtaaagagagcatcctccactctgcagtgccctgggtctttttcctcaagtaactatgagatatcatttcttgtgattctttgtccaaatctatgcatcagtgtatgtgtatacaaaagacattatattattaacgaatggtccccaaccttttggcaccagggaccagttttgtggaagacaatttttctatggactgggaggtgaagatggtttggggatgattcaagcacattacgtttattgtgtactttatttctattcttatcacattataatatataatgaaataattatacaacttatcataatgtagagtcagtgggagccctgagcttgttttcctgcaacgagatggtcctatctgagggtgatgggagacggtgacagataatcaggcataagattctcataaggagtatgcaacccagatccctgacgtgcacagttcacaatagggtttgcactcctataagaatctaatgttgccactgatctgaccgggtggagctgaggtggtaatgccagcaatggggagtggctgtgagctatgtgggaccagaggtttttcaccatctccatggtgacccaagggggaaagtgatgtgctgcaggtttccgggctggctgatggtcagagtcagtactagactgcaggacccctgactcagaccaaggcattccccactgtgtgttacagggaccggcagaagctgaagggtctcagaggaggaggctgctggttccagcaaatggtgctgaccccactgagagtaagtgttttgctcctggagatgcagcagaaatggtgggaatagggacggtgtcctaactggtgtccccattgctgagagtgctcttccagagcattccatgccagaaactgggggtcctatgctatagaccatcaagaccctaaattgtcttctcccatctcttcttcccactctacctcatcctttctgcaccctattaatgacactagccactctgtctatcctcttctccacctcctctcttctcctttgttgttcaggagaacaacagccctgaggggctgccctgtcctgcatggcaccactgacttcagtgggctaatagctctttatctgtgcctaagcccaatttgcagagctgttgtataaactacatactgattccaaagacttaatgcaagaaagaatggaaaatattccactcattattttgttaccgaaacaccaggtgttgggtctaggtcttggtgctcactgcacagagggccaatcactgagacaattagtattgacaaggaagaatactttcattgagtgctgtaggcaaggagatgggagctcagtctccaattcatgtcccctgatggactaaaactaggggtttatatagtagggataaaatgtaacaatgtgggccgggcacggtggcttatgcctgtaatcccagtactttgggaggccgaggcgggcgaatcacaaggtcaggagatcgagaccatcctggctaacatggtgaaaccccttctgtactaaaaatacaaaaaaaaattagccaggcgtattggcgggcgcctgtagtcccagctattcgggaggctgaggcaggagaatggcatgaacccgggaggcagagcttgcagtgagccaagatagcgctactgcactccagcctgggtgacagagcaagactctgtctcaaaaaaacaaaaaagtaacaatgtgtaagaaaacaggaactagggaggggtaaggaagcaatcaagatgaatgaggggtccagcatcccattggatgtagtgatttgtaagtttcagttctttgatactttgagaggcctgaaggtcatttcctgaaaaaggaactcagataaaacaaatgtaagatttgagctttaagaacagaagggtcaatttctatgtttatcaaaacaacaacaacaacaaaaaaaccttttgatggacatattgggttgatttcagttctccctttctatttatcaatcccacagtcacagagagtctggtcctggatctttctggctgcttcatggttgaggaggggcatcatgggaagcttcacataccatgggtgacctcatggccacccaggaatcaaaggttaatttaatactaaaagattgtgtttcttctgaaacacaatctctctctctcggccccacttccaccaaagacaaattatagcaggaccaatgtacctgcaaaataagtttagttccatatacgtggcctgattacccacacaaagtgcagcaaaaatcactgtccacataggctctcctaagttggctttgctggaacctctcacgaggccattgcaatcaaagccctgagaaaataaccattttatccaactgtgttccattgtaaaagaaaacgttgttattaaccatatgtaagcaaacacattgccatgaattaatagtcacaaataatttaaaaattctagagaaattaggcagagagagaaatatgcctcaaattctgtttacaaaagtatactcaatatacttaaagtatacttaaaggctataaatagcaaagaagaaaaaagttctccagactggaaaacaaaaccaaaagaatcagcaatatttcaaaccaacaaaagccatacgaattatttcagtcctctattagttcagtccactcaatcagctcctgcccagcttcatgtttggttaacaatcacaatctttatgaacacatcagtctttcttctttttttgttttgagacagagtctcactctgtcacccacgctggagtgcagtggtgcaatctcatctcactgcaacctccacctcctgggttctagcaattctcacgcctcagcctcctgagtagctgggaccacaggtgtgcaccaccacatctgggtactttttgtatttttagtagagacagggttttgccacgttggccagtctggtctcaaactcctggcctcaagtgatagacattcgcctgccttggcctcccaaagtgctgggattacagacatgagccaatgcgcctggccacacattggtctttcagttactgcactggaagttttctctgtaatccaatgacaacaatttttaattatatgaaaaatttacttaaaacatcccatttacatttactcaattctttcatttttaagtttatccagattgcttctgaaaattgagatattagacaccatcatttaaagttagttaatttctttgtcagccatttttttaatagccagtgaacatcaggtgctcacctaagagcttcaaagttaaatatatagatattttcaccaataagtcagaagactcagctgttttcattaaaccaacaacattaatttaatcttacttatcaaaagcttgactcaaagatcattttgttttggttgggcttgtagtcttaagtttttgtgccaaactgatatctcaaaatatctagcaaagacaaatataagcccagacaaaaatgtatgctgacaattctgaagacacttctgttttcttattttaccaataattttaaagctgacttgtttagtaaggatttacttaagtcacatgaacttgaaaattgcttggaattatttactttatttatgagtactcttttacttataagtcaatttggtagacacaacatgtaacttaataataaatgtacatacacataaacacatctagacctatatgcacacacaaagatccaatagcttttacctttgaactctctccatgagacagtaatacaaactcaccagtctacaaatatgttcacatggctgaaatttgttagctccaatagataattcagtgaaggttgtgaacccaaattttaggtaaagcagtttccatggcagtttgatttttaaaggccaaacctctgcagactccaaacagcatcgcagagaacaccacctagaaccaactaatcaggcccaatgctgcttagaacagcaacataaaagcctggatacaggaactccatcctactttctcattcagcagcaaacttcagtttccaagcaatattggagccaaacagtattacaaaagaataccaagtttactgaattccaatttcccatgactctagcaaacacatagaaataatcaccaaaacataatacaactgctgcagcaacaaacaagctccaagagtgtccagactgaaacaggcagggtgcttcctctctccattggttaggtttgatcaacctgccaacaaaaattgctttcaaatttctcaaattgagaggagccagtcgtgctgcctggtacccacaaaagacactcacttgccctgaaacaacacacaattacaaacaagcctccaagagtgtccagactgaaaggcagagtgcttccctctcacagtcacttgggcctgttcaacctgcaaatggaaattcctttaaaaatttctcaaactgagaagagcagatcctgctgtctgggcccacaaaggacaatcacctgtctggatgcaaatgtcaaatttcaaaggcagttcttcggaagtaatcaggaatgtggttggggccggctgcagtgggacctgagagagactgaaactcacctccagccaaagttagcggggcaactgcttgggagggcttctgagtctcctggcccatggcagcagagccatgagcaacactttcccagccagggaaccaaaacctgttaccaaaacctcaggggtttggtctaggtcccgctgctcgctgcacagaaagccagtcactgagatgatgagtattgccaagaaggctttaatagggtgctgcagtggaagagatgggagctcagtctcaactgtatctccctgaccaactaaaactaagggtttatataggaggcaagaaatgtaacaatgtgtaagaaagtaggagctagaatggggcaaggaaacaatcaagatgaatgaggggtcccacatcccatcatggtctggatgtagtgatctggtgagtttcagttctttgctactttttttgagatgcttgcaggtctttcctgaggaagtaactcagataaaacaaatgttaagtttccagtcgttaaggaccagaagggtcaatttctgtttatcaaaaaaacctttctatgggacaattgggtcagtttcagtttttgtatactcattgcatattaaattatattttacacatattcagtaccacacattaaaatgaatgtcacttttttctttttatgttctttaaatgaggctgttagaaaacatagcttggtactcctggccccttctatccctgtggatggtggtgtgcagtgctttgcacacacatctcatttcattcaatccctggtagtcctgagatctgggcaggtttgctctgtcttcaggtttgcttcttggtcagggcctgcttgcccccacctagctctgccccagcctcagggagggcagaggtcccctgccccagaccctgcactttccacagatgcagaagtggccaccctgggacatgctcccatgacaagcgcagcccaggcagcccgcatcctctgagctcccgctgcagccactctccctccctccctcgggctctcacccactttgctttctgcctccgtagggtcaatccatcctccccaggtgggttctcagccctctctgagggcagattctctggtgaccttgacgcccgtcagcgccttgggggccacagaggccaggcagtgtgggtgggctctctgtggatgggaggtgggtgggcaatggagcaacaggtttgcccatgcagggggctctccaggttctctccttgggttctgggcctgatgtgggatcctctgccccttctgaactgagtcccaactcatctggctgtctctgtggctttctccacccagctctgatgctgttctttgacaagtttgcaaacatcgtgccctttgactcctgggaccagctcatgaggcagctggacctcacgaaaaatgagatcgatgtggtcagagctggtacagcaggcccaggggatgccttgtatgcaatgctgatgaaatgggtcaacaaaactggacggaacgcctcgatccacaccctgctggatgccttggagaggatggaagagagacatgcaagagagaagattcaggacctcttggtggactctggaaagttcatctacttagaagatggcacaggctctgccgtgtccttggagtgaaagactctttttaccagaggtttcctcttaggtgttaggagttaatacatattaggttttttttttttttaacatgtatacaaagtaaattcttagccaggtgtagtggctcatgcctgtaatcccagcactttgggaggctgaggcgggtggatcacttgaggtcagaagttcaagaccagcctgaccaacatcgtgaaatgccgtctttacaaaaaaatacaaaaattaactgga

SEQ ID NO: 27 - DNA, 54269 bp, Homo sapiens
gtgctctgagtttttggtttctgtttcaccttgtgtctgagctggtctgaaggctggttgttcagactgagcttcctgcctgcctgtaccccgccaacagcttcagaagaaggtgactggtggctgcctgaggaataccagtgggcaagagaattagcatttctggagcatctgctgtctgtgagattaagcactatgtatattgctttattcactccccacagcaaccttaccaagcagttcttttccacgtgaaaagatggaggctgggtggagcaaaaggaggtatttagagtcctcagcaagtgagaggcagagctgggatttgaatccagatctgcctgatactgaagtctaggctggttccacctctccggactgctttccagggagtagaagacagatattttaccttagctggctgcttctagaagtctgaccctgctggctcaaaacgactttagttccttgcccagaggctgcgggctgcgggtcaagacatcagtagaaggagggcccagccagagaggctgacatgggcttctactcaccgtcatctctccttccttccaggagcagcccctgggtgcgtccactttctgggcacgtgaggttgggccttggccgcctgagcccttgagttggtcacttgaaccttgggaatattgaggtaagcctgggatttccagaggaggtttgggggaaagagaagtggtgaacgctattactgttccctatctagacaccagtgggccgagtggagcagatgccagttgggaccttcccgccctctctttggttattaatccattattgttccctgtacactggtatgagtggatgggggaagtatttagccaagtttttgagacctgtactcggagctaaaatgcattgtcttcctatagtgcgggaccccacaactgtggaggagccgcaggggatactgggtagtacgcagacattatgcactaaatgacaatggctcacatagtgaaaagttattcttttttatttttttttttgagagggagtcttgctctgtcgcctagcctggagtgcagtggcgcgatctcagctcactgatatctccgcctcccgggttcaggtgattctcgtgtctcagcctcctgagtagctgggattacaggcacctgcttccatgcctggctaatttttttttttgtatttttagtagagatgggggggtctcaccatgttggccaggctggtctcaaacttctggccccaagtgatctacccaccttggcctcccaaagtgctgggattacaggcctgagccactgcacccggctgatttcacatttttagataatatgaccacattataaaaatttatgtatttttatataatgtgaccactagatgaaagcaatatacttaggcttttatttcttggttaagttcctacttattatgaatttactctgcatgccaggaattctaagaatttgcatgtattaactcatttgattctcgtaataaccttcacatgcaggagtcactattacagtgactgtatgaatgaggaaagaaaggcactaacagaattgattttatgttacttaggtcaagattttatgttatttaggtcaaggttaattgtgttgttcaaatcttgtataactctactgcttgtctgtctttcttacccattatcgagaagggaacataaaaatcttacactatgactgtagattgtcaatttctcattttaaattaggatcatttttcctttatgtctgccttatgtgatattagtataatgatatcagttggtacatctttttccatccttatactttcagtgtttcggtgttcttatacttgaaatgtgtctgccgtaagtggtgtattgttcaagtttttcttttattatagaaaaatgtattctggaaggtacttttcttaaaattacagtatttagtccattttcatttaatgtaattgtcaatataattgggctaaaatctactatatttccagttgttttttattcgtggcatcaattcacttttctctactttcttgatttcttttagacgaattaagtaattttagaaagttcaccttactcctttattagcttgttaattatgcatgcttttagtattctcttagtaattgcacttgagttgtactacctaatagtacagccacatgttgtttaaaacagctttactgagatatgattgatatacaacaaatggcatataaagtatataatttgataagttttgacatatgtatgacatatatgacagtcatatagacacactcatatatatattcatgtgccatttcagtcaatgaccgaccacatatatgatggtggtctcataagattataatacggtatttttactgtaccatttctatgtttagatatatttagatatgcaaatacttaccattgtgttacaattgcctacaatattcaatacagtaacatgctttgtaggtctgcatcttaggagtaatagtctagaccatatagcctaggtgtgtagtaggctataccatctaggttttgcataagtacattctatgatgttggcataatgacgaaatcactgacgatgcttttcttggaacttatgcctgtcattaagtgacgtatgactgtatatatttgagtggaactatcactgcagtcaggatagtgaacatatatattacctccaaaatatttcgtatgccctcttgaatcctgtcctcctgcccctccccacccctgctccttttaggcatttagttctgtaaattttctcctagccttgctttagcggcatcccatgcattttgatattttgttttgattttaatttaattcaatactacataatttccttttgatttcttttttgacccatggattatttagagttgtgttatttcatttccaaatatttggggattttccagacatgtttctgttgtccaggccaataacaaattcctgacgccatgaagtcaaagatctaactccccagggggagagttatgcccaagaaccatcggtattttgtgttagtggtcattgccagagtgaattccacagtgtttgtgataaaccctaataattccaccagagggcagcaagccaacatgaaaattctattaaaaagtctttttttagagacaagagtttggctctgccgcccaggctggagtgcagtggtgtgacctcggcttaccgaaccctggccccaccgcagactcaacctcccaggctcaagtgattctcccacttcagctccccatctgcgagtagctggaatataggtgcgcaccaccgcacctagttaatttttgcattttttgtagagatggagtttcatcatgtttcccaggcttgtcttgaactcctgggctcaagctatccatctgcctcggctgcccaaagtgccgagatgacaggcgtgggccactgtgcctggccagacagaagttttcaagtaaagaataaatttagctgaagagcagtgtcaaattatttctatccccaccctcctgaattaaatcttcgtagtctctgattctctttgtcatattcttaaccatttggattcttttcagtgcgtctgtgtttgttccttttccccagtatgacccctttctatttttttttttttttttttttttgagacagagtcttgctgtgtcgcccaggctggagtgcagtggcacgttcttggctcactgcaacctccgcctcccaggttcaaaagattctcccacctcagcctcctgagtagctgggattacagatgcctgccaccttgcccagataatttttgtatttttagtagagatggggtttcaacatgttagccaggctggtctcaaacttttgacctcaagtgatctgcccgcctcggcttcccaaagtgctgggattacaggcgtgagccaccttgtccagacccttttctctatctttatgaaaacatctctccagtagatcttcagagtaaaaaaaaaaaaaaaaaaaggaaaaaagaaaagaaaaaagaaaaagaaaagaaaacatccagcaaggtctcggaggaaaaatagaaaattagaagactggagtgagtcatgttgattttctggtgtaaaatttgtatcgaaaccttacataaatactgaagaattcacaagttgtaaatatacagcttggtgactgattttgatatccagacagtttttttcccacttgcacacactccccgcaagaatgcatgctggtttgtaaagtcattaatttactggtgcatcagtggatggctctgtgtcttctggctttatcttggcccagaaagacaggaattaacgttgagcctagtagtctttggcctttgtgccaaagcagtctgtgggccagccttgtgtagtgatcaagcagtatgtttagatgtcaggcatgacacgggttaaaaagccagctaggggaaaaatgggaagtggcattttgcgatctcatcaaacaatcttgatataaacttagagaacaacctcttggcaaatggagagcagctgtaggtttctgactgaatgtgcaagaagaacgtgaatgaaagagatatactaggtgggagcagtcagggtagacttcctggaggaagtggacagtgttgtgtggattcacactttggagatatcaaagaggaagagtattccaagtgggggtaacaaataacaagggaggcaaaaaagaaaagtatgagggaacaacaggatgttgtcaggaaactaaggctgagctgaaatccaggtgacccagagaagccttgagaaggcttgtggcatcttgtggagcaagtggggaacttgctctgtttgagagaatatgcctggaatatatgggatatcatttaaattttctaaaggttatctacaagataatttcagagaatattcgctcccacctcagcgtaggaaacaatgaaaccctgaaacatttatttatttattttccttgcttttcttttttctttcttttttttttcttgagatggagtcttactctgtcactcaggctggagtgcagtggcgtaatcttggctcactgcaacctccgcctcctgggttcaagcaattctcctgcctcagcctcccgagtagctgggacaataggcatgtgccgctatgcctggctaattttttgtatttttagtagagacggggtttcatcatgttggccagactggtcttgaactcctggcctcaagtaatctgcccgctttgggcttcaaaagtgctaggattacaggtgtgagccactgcacccagtcttttccttactttttattttatttatttatttatttattttttaattgatcattcttgggtgtttctcacagaggaggatttggcagggtcacaggacaatagtggagggaaggtcagcagataaacaagtgaacaaaggtctctggttttcctaggcagaggaccctgcggccttccgcagtgtttgtgtccctgggtacttgagattagggagtggtgatgactcttaaggagcatgctgccttcaagcatctgtttaacaaagcacatcttgcaccgcccttaatccattcaaccctgagtggatacagcacatgtttcagagagcacagggttgggggtaaggtcacagatctacaggatcccaaggcagaagaatttttcttagtatagaacaaaatgaaaagtctcccatgtctacctctctctacacagacacggcaaccatccaatttctcaatcttttccccacctttcccccctttctgttccacaaaaccgccattgtcatcatggcccgttctcaatgagctgctgggtacacctcccagacggggtggtggccgggcagaggggctcctcacctcccagtaggggcggccgggcagaggcgcccctcatctcccagacggggcggctggccgggcggggggctgaccccccacctccctcccggacggggcggcttccttactttttaaaaatacgtttgtcttcaactattggatatcttcatctaatttctagtgttttttttggttgttgttggcttatttgatttttactttttggttaataacaaaccttttaaggagttacatagactcttatcagtttacttttctaatttgttttctcctgaattctcagttaccttggattgattgtgctttgggttcatcttgctttttcttagtggctactttcagtttccttcctcttcagtttggcaattttttcccttttcaagcaaggagctcctccctgttgaggcgtcacgggtggcgggcaatccttacccggatcctcccacagcttgctctctggaagctcacactgcaccgtaattatgaaacttttgatattgtccctgatggcttctgatgcaagctgggacagcatttgtctgttgataagtgaaaccaagttcctgagatctggctctcttttgcccttctatccaataccagcaaggccctagtttcagagcattttggggacttatgatcccttctagttacctctgcatctgtgccccttttcccctcaaattagttcatagagatttttgaagcacccatgttactcaaataggcccatttttagcatgtgggaggtaaggcctagatgtgaatccctcataagccaggcagatcaaactgtgtgtatgcatgcagatttggcccaggaacactcttctccttcagggcccattgtctacaaggacagaaaagaattcttaaggccattcactatctcacattttctgttatttttctgtcttttccttttccccctacccacagagaaacattagaatcattgccctttagaagagcagaactatgatgcctcctgtcagggatggaacgaggcattccatgcagatgacaacccaaagagagcaagagtggctctatttatatcagacaaaatcgactttaagtcaaaaactgtcacaagagacattaaagtatattatataatgaaaaaagcatcaatccaccatgaagatataacaattataaatatatgcactcaatatcagagcacctaaatatatgaaacaaacaatgacagaactgaagggagaaatagccagccatacaaaaatagtaggagacttcaacactgtactttaaataatggatagaacattcagacagaagattaataaggaaacaggggacttaaacaacattatagaccaaatggaccgaacagaaatacacagaacgttccaccctacagcagtagaacacacattatcctcaaatgcacatggaactttctccaaggtagatcacaagttgggtcacaaaacaagtctttgcaaatttaagagactgaaatcataccatgtatcttttctgaccatgatggaatgaaactaaaaatcaatggcagaaggaaaaatagaaagttcacaaatatgtggaaattaaacaacacactcttgaacaacaattaggccataaaaataaaaaaagaaattaggaaatatcttgagataaatgaaaagaaaagcacaacatacccaaacttacaggataaaagcagtactaagcaaagaagtactaagaggtactttattgcaatacacatctgcagtgaaaaagaagaaagatctcaagtaaatagtctaacttcgtgcctcaaggagaggagaagaagatgaagaagaagaggaactaagcctaaaattagtgaaggaaataacaaagattagagtaggaaccaagaaaatacagaatagaaaagcaatagaaaaaaaatcaacaaattttttgaaaagaataacaaaagaattggttttttgaaaagataaacaaaatcaacaaatccctagttaggctaagtaagaaagagagaagactcaaataaacaatatcagaaataaaagaggagacattacaactgatgccacagaaataaaaacatgaggctataatgaacaattctattccaacaaactggataatctagaagaaatgaataaattcacaaaaccttccaatctacgatgactgaatcatgaagaaatacaaagtctgaacagacttataactaatgtggaggtttagtcaataatcaaaaatgttccccaaacgaagaagtccaggaccagatggcttcacaggtgaattcttccaaacatctcaagaagaattaatgccagttcttcttaaactatttttaaaaattgaagaagagggcacacttccaaatttattttatgtggccaacattatcccgataccaaagccaaacaaagacaccacaagaaatgaaaactgcaggtcaatatctctgatgaatatacatataaaaactcataacaaaatactagcaaatcaaattcaacagtacatttaaatgatcgtacatcctgactgagtggcatttatccctaggatacaagtatggatcaacatacaaaaataaatcagtgcgaaatggcctattaacagggcaaagatataaagataacatgatcatctcaatagatgcagagaaagcatttgacaaaattcaataccctttcgtgattaaacaatttttcaacaaactggaaatagagtctcaacatcatcaagaccatatataagaaaattttcactgttgagtattatattagatgtgagcttttcatatatgggattcataatatgtttcaaatatattacaaagctatagtaattgaaacagcatgggaatagcataaagacaaacacataggccatcagaagagaagagagagctcagaaataaatccatgcatatacagtgccttagtccattcagcctgctaaaacaaaataccatagactggtggcttataaaacacagaaatttatttttcacagttctggaggctaggaaattcaagatcaagtagctagcagatttgctatctagtgagggcctgcttcttggttcataaatggccatcttctccatgtgtcctcatggaattagggtgatggagcgctctgggatttcttttataaggcactagtcccattcataagtgctctaccttcatgacctaatcacctcccaaaggtcccatctccaaataccaacacataggggattaggtttcaacatatgaattttaggggaaacaaacatcagtctattgcatatactacctaaagcaatctacaaatttggtgtgatctctattaacatcccaatggattttttttttacagaaaaaaacctctgaagtataaaaaggaccacaaatagctaaatcagttttgaggaagaacaaagctagaagcaccatacttcctgatttctaaatatattatactcccatggtcatagcagcactatttacagtagccaagatgtgcaaacaacctaaatatctaggatggggaaagaaaatgtggtagtcacataaaatggaatattatttgccttataaaggagggaaattctataatataagacaacatggatgaatcttgaagacattatgctaagtgaaataagccagtcaccaaaagacaaatactgtatgattctacttacatgtggtatctaaagtagtcaaatttatagaatcaaagagtggaatggtggttgccaggggctggggaggggggaaatgagttgcctgtcaacaagcataaagttttagttaagcaagatgagtaagttctagagatctgctgtacaacattgtacctatagtcaacaatactgtattgtacacttaaacatttgctaagagggtagatctcacttaaatgttcttactacaataaaatataattgataaagcaatagaaaaggattcctatacataggattcctatacataaaaaggtcaatacctaatttccatttaattaaaagcaatgaatagtcaatttacacacaagacaatttctgttattgaggcagctataggatatagaagagatttcccaactcactttgcaaggtgcacatagccttgaatccacaagcataatgtaaataatttacttttaagaaactcagacagaaaaatcctataatcatctcaaaagatcctgacatttctttttgataatttaatgcccctttctgatttttgtcaaatactaggaagctaataggtaaggaaaagtccctaacttgataaaaatacctaccagatgcccaaatcaaaaatcatatgaattaggaagttctggagtgcttctcattaaactcaggaacgtgtaatatcgttattaatgtattgttccaccctgttttggagggcctggccaatttaacaagttaggtgatttgataagttagtttaatacgcataacagcatggctgtcccgaggcatacaggaggcgatgggctgagtcctgactgcagctcccccaaggacctgccacgcatggattatacacaaagtctgttcaagtctgttgagggagtgaagggtcggggggcagcaatcccctgtttggcctgccaggtaaagcctttgtaattgctaatggctgggcctgacagattacacataggattttggcctggagcccaaataattcctaaactccatcctttgatttttcagagcccaagcgagaaacataggctaccccatcatggacctgaatgggttggattttgagggtctctgttaggagccaggttattagtctgcagttacaataaatagaccatggtcaggatcaagatcacttccagcatcgtgtacagattaatatgcctggggtagcttaggtaccagaaaaatccatgtttacagaaatgtttgtttgcagcattcagtggcacaggaacaaaatatttatttgtggggatacatccagcattttgtcaaattcactggggaactgcctgggacaggcatatcaatgaatttagtgacttggaagtcacacagtctattctgtaggagagagagaaggaaggttagattcccacttctccctcctctgtaccctggctcatgggttcataggcgctcacgttgggggaattttccccaaccactgtgacatgggtaagggtagcatcttccgactatcctccagggaggtgggctgtaatctggcctggatcctctgatgactaaaaaaaaaagtttctcttctgtacattgatatccatcccttgaaaataaccaggcaaagcaacaaagccactttatggaaaacattgaattagaagcctcaagttgatagtgattattttttgcaggcaaaaaaatccatgctcagcaccaaagggataactgatgaagagggttactgtctctcatgctttgttttttaatagctaatctaatctctcacctatctgagtctttagaaaggaattgaagggggtggggggcccttgtagggttccccagagagactgaggctgtgcaataaaaggaagcaggtagacagtctgatcaaatatgcagcgcaaatgatgactgcccctttgaggaatgccacactgggaccccagactgttcccctgagatgcatagtccaggccgaggttcttttattccctcctgtcagtcacttaaccctgtccttcaattgtctactaaaacactcaatcatccctgctgcttggaggcgatagagagcatagggcgtccatcatatatgccccatgcttgggcccattgatgtgtggcttgggccacaaatctggggccattatcagatgcattctatgcctgggaatcaaccatctaagatctgaaattgtgtcaccgattgattgacctgacctcacaaggaggttttttatttgtttttgtttttttttttgagacagagtctcactctgtcacccaggttggagtgcagtggctcaatctcactgctacttccatctcccaggttcaagtgattcttatgcctcagcctcccgagtagctggaattacagacacgcaccaccatgcctggctaatttttgtatttttagtacagacagggtttcaccatgttggctagcctggtctcgaactcctaacttcaagtgatccgcccacctcggcctcccaaagtgttgggattacaggcgtgagccactgtccccagccactggacttgataaccatccggagtatcatgaacaaagctagaaatctgagtctggttgcaacctcatcatctgctgcttccacttccttatcatagacccaggggaccaccagtgtagcctgccacggctccaggtttggagtgaggcgtaggttccaggcagctcctgttgaccctgctgctgcaggccaggtcagctgtccttgcccaggtgtgaatcatgggcatgtatctccctgctgggcttccgctttgctgccctttcctggccctttggccagagagagcaggcttttctttctgttgcttttccttgtttgttcttttttttttttttttttttgagacggagtttcgctcttgttgcccagactggagtgcaatggtgcaatctcggctcaccgcaacctctacctcccaggttcaagcaattctcctgcctcagcctcccaagtagctgggattacaggcatgtgccaccatgcccggctaattttgtatttttagtagagacggggtttctccatgttgaggctggtctcgaactcccaacctcaggtgatctgcctgccttggcctcccaaagtgctgggattacaggcgtgagccactgggcccagccatttgttctttctaatttaggcctgttggtggttctggattgcaggcctctttcgttttcagtctggcatgtgtgggaataaaaagacagcccagggcacaaaacagggtgttgttcctgcctctgggtcccccgccagtctgcctctactttccacctctcagggttgtgtgattgtctgttgatttattcccagggtatttaggtgtccttagaggggagaagcagggaaaagtgaatctatgccatcgtgtctcggaactggaagtccacccccatccccacacacactagaattgcagaagaaaaataagatgagaacttgagtgaaaaaaacatattattatgcaatcatcaaatgtttggacagaaagtgttcttagacaacctctagtctaatttctcacatttggaaatctggaagttggactaagacctgaatcgaccaccctcacccccagttcagctgactgactccccagcctgtattctcaccattccacaccaggatctgtcctgaggctttgaaaaaatgtgaactgcatgtcctgctcagatcccaaccctcccacaccactttgctaagagtctgttctgtctgcaaaaatcccaaaagttgtgtcaactggaacgcaaaatgttcttcatttgactttcattgttttttggaattttggggggccagggaggagcaagaaaggagctgcaattgcccttgggtaagatttgcttagaattttaggaagaagttgtctgggcacagtggcttactcctgtaatcccagcactttgggaggccgaggtgggtggatcacgagatcaggagttcaagaccagcctggccaagatggtgaaaccctgtctctactaaaaatacaaaaactagctgggtgcagtggcaggcgcctgtattctgctagggagctgaggcaggagaattgcttgagctggcggggtggaggttgcagtgaaccaagatcacaccactgcactccaggctgggcggcagagtgagactgtctgtctcaaaaaaaaaaaaaaaaaaaaaaaaagaagaattttaggaagaaatctatctgattctagaattatctaggctgttgaggatgtgtgtctggtggccactgggacatcagggtgagacttttcttttaactgcatgtatgtgaattaggttgcttctggagcctactgagagctcactgggtccccatagcatccatgctgaaggcgccttccttctgtctgtgaccttgaccctcagctccacatttccccaggggctgcaggatttctcagaatcctcattagcacaacctatttttttttttttttttcctgaaacagagcctcactctgttgcccaatgcagtggtgtgatctcggctcactgcaacctctgcctcccaggttcaagtgattctcatgcctcagcctcccaagtagctgggactacaagcgtgtgccaccattcctggctaattcttgtatttttttttgagatggagtctcgctctgttgcccaggctggagtgcagtggtgcgatctcggctcactgcaacctccacctcccgggttcaagggattctcctgcctcagcctcccgagtagctgggactacaggtgcccgccaccacacctggctaattttttgtatttttagtggagacagcgtttcactgttttagccaggatagtctcgatctcctgacctcgtgatccgcccgccttggcctcccaaagtgctgggattacaggcgtgagccactgcgcccggccaacttttgtatttttagtagagatgggggtctcactatgtttgtcaggctggtcttggactcctggcctcaagtgatccacctgcctcagcctcccaaattggtaggattacaggtgtgagtcactgtgcctggacagcaccacctattagtgaatgacagccttgacttttgaggctaaaactttccacttctttagtatagtaattaaatctctcgctttttctactatttcggtaattaagcaggtaaagaaaaatatccagaacaatataatagggagtagggcaagaaaatcctgaggaaccacgacctgtgggtggatcgagtgcaggggtccttgagtgtagctggttgcaggaaggccccagcagaagggggctttgatgagcatccaccttgtgtaccgagtgaatgtccgtccagatgaggtgcggatgcagctgacaatggaggcgactgtaatggactatcccaagtagcaacatcatcaatttaggttttcagcctgagtgagactttcagttaatactcaactgaaaacaagatgcaaattttccttcagaaatttgttgaaagtgttttcactttggtactattgatctattaaagggctgagatgcagaggagacaccattgtgtaatttctagtggccgctctttttgtccgttatctgttcactgttctatccatgctgttctgccacacccctttttcacttaccaacacatgttggagattgctctctatcatagcatttcctctcctattctctagcctgcctcttcactctcttaatggtatcatttttctgaaaagaagctcttaattctaaaatggtcctgttggtggttttttccccttatggtcagcactttttgtgtcctttttgagtttttgtctactccaatatcataaagacattctcttaggatttctcataaagttttactgcttccttcttttttgagagagtcttactctgttgcccaggctggagtgcagtgctgcgatcttggctcactacaacctctgcctcctgggttcaagcaattctcatgactcagcctcctgagtagctgggactacaggtgccccccaccatgcccagccaatttttgtatttttagtagaggtgggggtcttgccatgttggtcaggctagtcttcaactcctgacctcaggtgatccacctgccttggcctcccaaagtgctgggattataggtgtgagccaccacgccctggtcaattgcttcctttttatatttagattgactatccatctggatttgaattttgtgtgggtaggaaatcaaggctcattttatttttatatggctatcttgttgatctgtcgttatttactataaagacgatccttttttcacttcacctcattgtcacctttacccatgtatcaagtgagaatagagtgtgagactttaaaaaattaatggattattttttaagaacagtttcaggtttagagaaaaaacagagcagattagctgggcatggtggtatgcacctgtagtcccagcttattcatatgcttatttgccatctgcgtatctttttgtgaggtgtctgttcagacctcttgcccacttttcaatcgggttgttttcttattgttgagtcttaacagattagcttaatcagattggcttcgggaggctaaggcgagaggatcgcttgagcgcgggaggcggaggttgcagtgagttgagatcacaccactgcactctagcctaggtgacagagagagaccctgtctcagaaagaaaaaaaaagaaagagcagaaagtagagagttcccatataccctctgcctcctacacttctcccctccccacactttcccgttattaacatcttgcattagtgtggtacatttgttacaagtgatgaaccaatattgatattgtaggggagggcaaatctgttttccttctacccttctaagttcatggctgagaaccctataacagaagacagattaataagagaaaagtgcataaacatatttaagttttatgtgacatggaagcctttataaggaaatgaagactccaagaagcagttacagtttgatgtaggtttgataaagggtggacagttgtggaggatatgatagagcaaagagtttgaagtaagtgtagtccgctggcagaagcttatcaaggcccgtttgtttagttagattcctctctgtgtccctttgtcttcacagataccaccaggtatagggagggcatctctcacctgagggtcttatgacctggcttcaggagaaggtcagaaaacccttcctgcacatgctgcttttgcaaattccttcaccttaaaatattcaatatgtcattgtgttagtctgttcttgcattgctctaaagagatacctgaggttgggcaatctataaagaaaagagttttaattggctcatggttccacagactgtataggaagcatgatgctggcatctgcttggcttctggggaggcctcaggaaacttacaattatggtggaagacaaagggggagcgagacatctcatgtggctagagcaggggaagcaagagagcggggaggtgccacatatttttaaacaaccagaatatcatgagaattctatcatgcaaacagcactgtggggatggtgctaaactattagaaaccacccccaagatccaatcacctcccaccaggctccgcctccaacattaggaattacaactggacatgagtttgggtgaggacacaaatccaaaccatgtcagtcgtggtgccatattttgtggtagcacgtcctgaatcccatcaataaattattctgaactaaagttccatagtttccattagggttcacttttggtgtacatcctaccggttttgccaaatgaataatgccatgtagaaccgttacaatattgtacagaataatttcactcccctaaaaatcccctgtgctgaacctattcacacttcctcccctgagtccctggcaaccactgtctctatagttttaatcagaatgtcacatagttggaatcatacagtatgtagcctctccagattgccttctttcacatagtaacattcaattaaggctcttccatgcctttgcgtggtttgatagctcatttctttttattgctgaataataatctatggtatggatgtgccacagtttatccattcatttattgagggacatcttggttgcttccaacttttggcagttatgaattatgaataaagctggtataaacattcatgtgcaggtttttgcatggacataaatgttcaatttgggtaaatatctagaaacgtgattgctggatcttgcggtaagcatatgctttggccaggcgcggtggctcatgactgtgatcccagcactttgggaggctgaggtgggatcacctgagatcagcagtttaagaccagtctggctaacacagtgaaacctcatctctactaaaaaaaatacaaaaattagctgggcgtggtggcgtgtgcctgtaatcccagctactcaggaagctgaggcaggagaatcgcttgaacctgggaggtggaggttgcattgagccaagatggcgccactgcactccagcctgggcaatagagtgagactctgtgtcaaaaaaaaaaaaaaagaaaaaaaaatggccaggcgcagtggctcacacctgtaatctcagcactttgggaggcggaggcaggtgtattatttgaagtcaggagtttaacaccagcccgaccaacatggtgaaaccctgtctctactaaaaatacaaaaattagctgggcgtggtggtcatgccggtaatcccagcaacttgggaggctgaggcaggagaatcgcttgaacccagaggcagaggctgtagtgagccaagatcacacttgccgttgcactccagcctgggagacagagtgagactccgtctaaaaaaaaaaaaagcttcatgacaaacttccagactttcttccaaagtgtccgtatgagttttcattcccacgagtaatgaatgagagttcctgttacttcacatccttgccaatgtttggtggtgtcagtgtttcggattttagcaattttggcaaatatgtagtggtatctcactgttgttttaatttgcaattccctaatgacatatgatgttgaacatcttttcatatgcttatttgccatctgtatatgtttttggtgaggtatctgttcagatctcttgcccacttttcaattgggttgtttgttttgttattgttgagtgtcaagagttctttgtatatttttggataacagcatggtttttgtttttgtttttgtttttttttgagacagagtctcgctctgtcaccaggctgtagtacagtggcatgaacttggctcactgcaacctctacctcccaagttcaagcaattctcctgcctcagcctcccgagtagctgggactacaggtgtgtgccaccatgcccagctaatttttgtatttttagtagagacgggctttcaccatgttggccaggatggtctggatcacttgacctcgtgatccaccagtatggttgagttttaagagttctttgtacgcttttgggtaacggtcttttgttttgcaaacattttctcccaatctgtggtttgtctcttcactcttaactgtatcttttgaagggggatctcaaagaacatctggtcccccacaacaacatgtcatgtcaggtgagagatgactcattttctcagaaactaggattttgtgtcatatgttgtaaaccacgaaaagttaattttataacccaccttctagatctactgagaatacgtggtgttatcactaacagttttgaggaaagaaataattgcctaattcattttgtagtgaatgtgttttgttactaccacagatactcttaaaatccacttattatggagggggaaaaaaaaggaattttctttacagaaagtgaggagtgaaacctaatggagaaaatatctgtttcagggaataaccctcccaacatctgatttttttttgttttagacaggggctcgctccgtcccccaggctggagtgcagtgatgcaatcatagctcactgcagccttgaactcctgggtttaagcaatcctcctgcctcagcctcctgagtagctgggaccacaggtgtgcaccaccactgcaccaccacacccgactaatttttttgatttttggtaaagacagtatgttgcccaggctgatcttaaactcctgagctcaagtgatcctcccacttcagcctctcaaagtgctaggattataaatgtgagccactgcacctagcctgatcttttttttttttttttttttttttttttttaagaaacagtcactagtgctgtatgtaggttacagtagctatgtaggcccttcagagtcacttcacttttctgagctttcgtttcttcaacgtcttcctgtctgtaagacacatgctcttctacccctgagaccaaaaaatgttaccagtgaggatctaatgatataaaatagggaaaatgctttaaaactgcacagtgcttaacaaatgcactgttattatatcattaaaagtgactcctgggtggtgggaatggttgcataacgacgtgaatgtacttgatgtcacttaaaactggttacaatggtaaattttatggtatatatattttaccacaattaatacattttaaaagatggttcttgacaattattcttagcgtctgaggtgccccatttcttgggtatgggcatatagtgcctcaagaatattggggatcctcacctcttctatgcccaaacctttaagaaaattctgggccaggcgcagcggctcacagctgtaatccaccactttgggaagccgaggtgggtcgatcacctaaggtcgggagttcgagaccagcctgaccaacatggagaaaacccgtctctactaaaaatacaaaattagctgggtgtggtggcacacacctgtaatcccagctactcgggaggctgaggcaggagaatcgcttgaacccaggaggcggaggttgcggtgagccgagattgcaccattgcactccagcctgggcaacaagagcaaaactccatctcaaaaaaaaaaaaaaaattctggaaaagctaggtcagtgacatgaatattggaatcagagtctaacaaactcaatttcttcctttctaaatccgtggtacggattcatgtctgcagtagtttttctgagaaagcagaaggggtaggtattggcaatcaacaagctgcagagtatgcagattgaggtcagtaactgtaaatgccccatgactgtctgatcattttaataccaaaagaaaaacttaaaatcccagttgctaaaatctttgtcttagacaactctttgagcctctccctacaaggcccagaaaggaatgagatagatgtgaatggaatctgttttcccttcccttgccacgctctggaggaggagtctagggcagtagccaaggccagctgccagtcaaggaaaggggagcggccccgttgaatccacaaaccacaccatcctggcccatgggttatatacaaactcccacattggcaacaaacaaagggcatgcacattcaggggattttgctttcactgtgagtgtttatctttgaagggtgtcacatcaagatgaatgggaagggtgtgttgcagttgagctgaggtttggtctttcttggcttttttagggacacttacaggtccaaatctgctttcagccggctggtggacatggtaggagacacagtagtctcaggaccaggcctccaggtgggagctgagattctagagggtggaaaccacttggagattgagtcaaagcagacctgtcctcattctgtgctgggcaggagccagctctccatgtccctgcagctccagcaacacctccggatctttcagcttccctgggactaaggaccatgcacattattaattctgatataaacagtcacacaggcacatgtctcaagatgagggtgagaagttggttacagcaaatgaagtaataatgatctttgtgcttcacaataggaattcaaccaacctgaggtttataattcacttattaacactttttatttttgttgagacggagtgtccctctgtcactcacgctggagtgcaatggtgtcatctcggctcactgcaacctccgcctcctgggctcaagtgagtctcgtgccttgagtggctgagactacaggcacatgccaccatgcccaactaatttttttgtatttttagtagagatggggttttgccatgttggctaggctggtctcaaactcctggcttcaagtgatccgcctacctcaatctcttcaagcgctgggattacaggggtaagccactgtgcctggccataattcatttatcagtcatatatatatacacacacactgggagaatctagggtcagtgccttacaaatggcacaagttgaagccctgagactcccactcctaccctgctccccccattctcagtactgctcctcagatgcctccagcagatcatccatttctgctaggctgggcctgggtacatgcagggagatgtgtacaggggctaagagcagaaacttttgagtgagacactcctgagttcatgcactggccctgccatttgtcagctaattgatgttgcatttaattgcatcatctgtatgtaagcctaataatttatagccatcttagagatgttgtgagcttaaataacatagtagtgaatatttatttatttgtttatttatttatttagacagggcctcgctctgtcacctaggctggagtgcagtggtgtgatcatagctcactgcagccttgacctcccacactccagttatcctctcacctcagcctcctgagtagcttgagacaacagatgcatgccaccataactgactaattttttaaaattttctgcagagacagtgtctccctatgttgcccaggctggcctcgatctcttgggctcaagcgatcatcctgccttggtcttccaaagtgctgggattactggtgtgagccactgcacccacagcctatttattgagaaatgtggaaggcccaggcactattctaagtgctccagctgttttatctcccacagttttgctcagataggagttccaaagctggagctggaagactcatatttttagaaatgttacagttaattctgaggtgggtcagattgagattcatggctatgcattaatgtttaggtggtgactaaccactcagggttttagagacaaacagaccttattctgtcactcactgactgagcgtggccaagtctttcagcctctctaagcctcagtgtcctcatccataaaatgggaccaatcgtagcatccacttctgagaactgttcagaagtggaaatgagctagtttaggtggctgtgtctggcatacgccaatggtttgataagtattagcttgtgcctttattaggccaactcctttttgttaggtgactgagaaaccaaggaccttctgccctttatgcaccagtcactattagtttaaatttgttgctcttccatccacatgattcattccaaatttgaagtgttggagaaagggagttagtatgtcatagaaaaatctctgtttttggctcagcaggactgagtttgactccatgtaactgtctgagtcttagtttcctcatccataacatgggagaacaataccctgaattagagaattctgctgccagaattagagatagttcatgtcaaggtgcaacatataggtaatgtgttattgctggtgttctggttataaaatgtacaagatgtgaaagcaaaagggcagaaaaccctttttaaaaattcatggctgggcgcgctgcctcatgcctgtaatcccagcactctgccaggccgaggcgggtggatcacctgaggtcgtgagtttgagaccagcctgaccaacatggagaaaccctgtctctactaaaaatacaaaattagccgggcatggtggcgcatgcctgtaatcccagctacccaggaggctgaggcaggagaatcgcttgaacccgggaggcggaggttgctgtgagccgagatggcaccattgcactccagcctgggcaacaagagcgaaactccgtcccccgaacaaaaaattcaaatgggaaagagaggcagatggcagagaacaggggaggggctgggcaccgtggctcatgcctgtaatcccagcactttgggaggccaaggcgggtggatttcttgaggtcaggagttcaagaccagtctgaccaacatggtgaatccccatctctattaaaaatacaaaaattagccgggggtggtggtgggtgcctgtagtcccagctactcgggaggctgaggcaggagaatcacctgaactcaggaggtggaggttgcagtgagtcaagatcgcaccactgtactgttgcctgggcaacgcaccgagactccgtctcaaaaaaaaaaaaaaaatgagagaacaggggagggtctagggctcagagctttggagaacagacctcagtagcaccaacactccaggatcaatgctacaaagacacgggttacaactaaactggagaacatggccaaggatgggaactcagcctgagcagggctgagccgagcagggctaagccaagtagggctgagccagaacacttcctccttttttctgaacaatctacctacatttcagctacagggctggctttacccagtccggcgggagggaggagagggctggtctgtgacttcagtgctgaggtttgatcaaggcaaagggaaacttcctattcccagaccctttgcaagaaagaatggcatattacttgccaccgacaggggttattattactaaatggagtcagtataaatgctttccaataaagcatgtccagcgctcgggctttagtttgcacgtccatgaattgtctgccacatccctcttctgaatggttggaaattgggcatctgttcctttaaacaggaaacatttcttgttcgagtgagtcatctctgttctgctttaggagtaaagtttaccctgcagttccttctgtggtgaagttttctctttctctcggagaccagattctgcctttctgctggagggaagtgttttcacaggttctcctccttttatcttttgtgttttttttcaagccctgctgaatttgctagtcaactcaacaggaagtgaggccatggagggaggcagaagagccagggtggttattgaaagtaaaagaaacttcttcctgggagcctttcccacccccttccctgctgagcacgtggagttaggcaggttaggggactcggagactgcgatggtgccaggaaagggtggagcgggtgagtgcctgttgccaaggtggcctcttcaacaggaaaccacaatatttttgtttcttgacttgctctagaaacagggctgtgggggtggggaagcaacttggatctgcccttctgaggacacctctgggtgctgcctggcccaggtctcctgtgtggtttctctctgagccgttgcctctgactttgctactttttcactctgagcagtctccagttcctctgctacctttttgtcctccaagcttccctgccgcctcgaatgcagatacacggtctccctcctgtggacccgtttggagagtccagaagactttatcaatccacttttttttctttttcatttggccctggggccgacggttaagtactttattctgtcattctgtcgaatcacgatgccctgaggtgcacagccccttccccctcttccgtgtctgaagggtttccttttatctctccacccccacccttgccctcctgccctctctcttgttccccaaagacagttctctaatgttttgatgtggattcgtgaatttatctgtatctttgcaaaatgtatttttcttttgtatgtgtacactgttttttaactatgcgatctcaggcaagtaattcctctgtgcctctgttatctcatcattaaatgattaataatgcctccagaggtgactgtgaggcttgaaggagataatacgcatacatcacttactacacgagttagcaattattattgcatattaatactattggtattttattttgctcattctgtttctatttcttttttatttatttattttttgagacaaagtcttgctctgtcacccaggctgcagtgcagtggtgcaatcacggctcactgcagcctcaacatcctgggatcaagcaattttcccatctcagccttcagattagctgggaccacaggcgcgtgctaccacacctggctaattaaaaaatttttcttcatagagatggtgtctcattttgttgcccaggctggtctcaaactcctatgctcaagggatcctcccaccttggcctctcaaagtgctaggattacatgcatgagccacggtggccatccaggcattgatattatgaggccatcttgacctagccctctctggtgaagagtccttttcagatacttcgttcagtcttctcagctatgagtccctaccctctgaaagcttatattctatttggggaaagacaaaaggcagtttcaaagaagagaggtgtttgattttcttttcctacttttaatatcagaaaacatttcatctaactctcagtatgaaggcaatattttgtttactggtatatccctagagcccaacatggtgagggccccaggatttgcttctttgataagatggtaaacccagctttcagctaacttcatggtttcctcagctacactcatatacaaggatcacctttggtaagatggacttaccatcttaccaaagagtttttgcattttagagttttttctttttagatttttttcattttagaatttttttatttcagagttttttctttttagaggtttttcattttagagttttttctttttagagtttttttttttttttaattttagagtattttaggctgctgagggtggaatctggtgaccttggggccacagagatgctccttggctaaaccaggggctttagctctgaaagttcacagccaccctgagaaccaagatgagagggctctgcagtgtccaatctcaagacctctctgaggtgctccatcaagattcattgaatgaaaaaattaaagtcttaatgatgaacccagaaaaatctttaaatcctaaatatgaaatgaaagtgttcttagttacaatccagtccaacgtccttgttttggaatgtggaaatgaggccccaaaggtaaaatggcccatccaaagtcacagccaggggccagtgctcaggtggccaggtgccctgcgtgcggtctcctggaccaccaggcctttttcctgcagctttagaagctttagaaggcactctgctcactcaggggcaagtggtaagcgctctttcccctctagtgtttgtgactcaggagtttcgaaacaggaagtagagctggctggctgtgcccttccgtccttcattagacgtttgctcttgtcttagatgctcagatggtagtggataggcctgtgacgaaggtgctaccatcgtgagagtaaggtaaggatttgcctctttgttaaggtcagaggggccttttgggaggaaggcctttgattctggagttttctaggctgctgagagtgagatcgggtggccctggggccatggaggtgatcctcgtatgtgagtgtggatggggaaaccatgaagttagtgtaagaggtagcagtccctctgagagccttgccgagggccgtgcagtttccagatctgaaggccattctagcttagactgatgaagtcctaggagcttctgaaatgctgcaagtttaactacttgtataaaggcctcatcctgatcccagtcaaacttgtgaaataatagaagccaaaatttaaatctctactgactttgctgctacagctatcctcccaccaacacacatacccaccaacatacacacttgccaacataaacgcacacacacatacacacaaacacacccatgtggtcctactaattcaattatttattttttaaagaaattaaaaaagactgggcgtggtggctctcgcctgtcatcccagcactttgggaggtcgaggcggtggttcacctgaggtcgggagtttgagaccagcttgaccaacatgaagaaaccccgtctctactaaaaatacaaaattagccgggcatgatggcgcatgcctgtaatcccagctactcgggaggctgaggcaggagaatcgcttgaacctgggaggtggaagttgtggtgagccgagatcgtgccactgcactccagcctgggcaacaagagcgaaactccgtctcaaaaaaaaaaaaaaaaaaaaattaaaaagatacagaacagttcaaaaaacaatataatgggaagactagatagacacaatcagagacctgcacttgtggggttaagaatttacaggtgaagttgcaagtttcattctgtttgaaaatgatgggattatatgttttgctgaggtttggacacctttgctgggttgtttgaatgccgtggctgcagcgccctgttatggacatcatgtgcgtgcagaatggatgtctgtcaggttccggggcagcccgcagtctgaggcagccagcctggattggagggagtggcaatactacctgccggttaggggtttgggcctgagagcgagtggctttcaggttctctcaagcttcggatgagatgcaggtttctgcttccgatggcaaatgcatgttttgctttttagttatcactgcaagagctaggatgctgctagaatattactggaatgattgtgatgagatggaatgtatttacagtttaattgtgacatgtaatacagtggtagaatgggactctggaatgagatgctggggcctagattctagcacttcctttgtgaggctctaaccccctctcctatagtggatttgttaagaacttctgtttttgtggctttgttattataaaattttttgaaatgttgttctctaaaaaagttatgattttatgtttttcttcatgagattctttcactgccttccagctgcaagtagaatgacgtctaaatctttgtgatctgtcactgaagcccttgagtgagacacttaaatctggctgtggctctctctcttactagcttatttccaagccgtgatttttcacaacagaaaaatggggacagtaatagtagtttcttcagaggcttttagtgaaatgaggttaaaaaatatttttatgtttatatggatatatagattacaaacatttatatatcatttatttatatgattattataaacacatatttatatttaaatactttggggcataaatatataaaataataaatatacttatgtaatacaaatagacttatatacatttactatttagcagagattatataaaatatatgtattacatggcaacatattcaaatttacatatgttatatatacatgtggaaaaaaaattgggaaaaggccacaaaatgtgaccaaagaattacttccaaatggcaagtttttaagtaatttttattttctttttatacttctctgtactttctctatgaaacaagtgttacttttactgtttttaggaaccaaaaatacaagtacattgtttaaaaaatactagcttaacaaagtttctagcccataagctagtgcagaaaatctaggtcccataaaacaagaactgccacacgatgtctctccccttacagtgctggatggcccgttgttaatggtgtcataaatcctttgcaagtgactgttttctaggtactatgactagagggatgtgtaacttaagcaaaaaacaaaaaacagaaaaggctgactatcatctgacagtgtatcctggaacacctaggccagagaagaagccacgttagcattttcccttctaaatgtcagttatgatttgatggggaaaccacttaaaaagcattgtcacgttgttgaaaaggtaatgaaatgagtgagatgagatggctatggaggacggagctatgcgccaatcttattatatccaaattcatgtcatctcagccttggattgtattgatttttattatatactgtcagaaaatgctattgaatgtgtaacaagagcctcaaaaaggtttattcattttgacaccataatactacttttaggaaattattctaagaaaataattagaggtattcttaaagatttgcgttttaaagtcatcctaaatgtaatcaggaactggctatgtaaattatagcccatctctaagattaagtgccttacagatattaaaacccatgctgtagaagaaaaactaaagacaggaaagtacttacaatacaagatgtacttaccagtggaaaaatccacttatactacagaaatatgatgtgttcaaatataaggaaaaatgtgtatgcataaaatatttggtaggaaagagtaaaatattactgggcatttatatttggatggtggaattatacataattttaattttcctttttatcttttctgtattgtctaaaatgaatacactaagcattgttatcctcagaaaaaaataattgagggatgggggaaaggaagtcctgctttcatttgattctttggttggttttattctgtaagatgagactttaacagaggttagaatgcattaaaaattgtaaagacagttgacctaatggcactaaacagggttagatctagtttagatcttttccagcatgtgaataagaatggatctttaaataaagattttaactaggtatatgttttagaataagtcatacatgtacatggtaaaaattcaaacagtacaaactgtgcagcaaggtatgggaaataaagcagctctcactgtcacctccacccatcagccttctcacactgcacgcccacatctgtgtgtaattctgcttttctttaacattactgaaggaacttcctgtgcattttttgtcagagctcttctgtgaatacacaaaatatgtactgatcaatacattatgtagatcacgcaggctcaaccacattgatcttcctattctttctagtagccaaatagagttccctggaatatgattaatagcttgcctaaatcttctaatgctgataaacagttgtttctgctctttcgttatttcaaggaatgctaccatgaatagccttatatatggttttgagtatacttgtttaagtgaatgtaggaaaaactcttggaagttaaattgtgggccagtttatgtgaattttatattttgacagagatggctaaattacccacctgtttttttgttttgttttggttttggttttgctttttttttttaagagttggggtcttgctacctggggtcttgccacctggggtcttgcccagggtagacctgaactcctgggccacgttggtttattttactgcattcccagggcctagagcaacgattgacacgtgctagcagtatctattggaaattctggccaacttgcaatagacctgattatttctacactgaacatgtctaagatagctattactattcattcaggaaagcccagacaattatcatgccagcagcctgagacagtagccagtaatagcctggtgtggtagtttgctcctgtagtctcagctactcagcaggctgaggtgggaggatggctctagcctgggaggtggaggttgcaatgagccaagattgcgccctgcactccagcctgggtgacagagtgagaccctgtctcaaaaataaaaataagaataaaaaataaaccagcaaaagtttctgccctcacagagcttccattctagtgagagggtagtttgtcatcaggagggtgacgccggtagggctgggggccagctccctgcagggaacaaacatgatcgcagtggggtgggagtaggggatgagtccccagagcctctgtggtttccatttccacacaaaaaaaccactgctgctgtaatcaggagggggaaaagatttttaaaaattttctttcagggaatggaaggaaaggatatttttgaaagtaagactttgaaaactaaaagttttgggtcacttaaaaactcaaaatctttaggtcactttaaaaatatttaatcttggagctggaggccattattctaggtaattagctgggtgtggtggtgtgtccctgtaatcccaactactaggaggccgaggcaggaggattgcttgaacctgggaggcggaggttgcagtgagccgagatcgcgacactgcactccagcttgggtgacagagcaagactgggtctcaaaagaaaaaaaaaaaacgaaaactaaataccgtatgttctcacttaaaagtgggagctaagctatgaggatgcaaagacatacagagggatataatggactttggggattgatggtggggttgaatgggaggttggtcctaataggtcctagtacgtcccctacttctaagtcttccagtctgtcctttgcactttgaatgttaattccaagttggataatgtcattctcatttttacagtcctttcttagctcctcatcacctccaggacaaagcctaaacccctcgccccatggtaatgcggcccctttgtgacatggtacctggctagagcttcatccctttgtcccatcactctccatcccagacactttgtagttactttattgagctccttgtgcctgcctgaatggacttgaaagttcttacctccatcttttacattaattgtttcctgtaagaattgtgctttctcgcattctccccaaaatcccttccccataggaagcccttctcccaggctaagttaaggtttcttcctctacatccctaccacactctggtcacaaccctctaaccattggcttgttttttttgttttttgtgttttttttttttttgtgagacggagtcttgccctgtcacccaggctggagtgcagtggtgcaatctccgctcactgcaacctccacctcctgggttcaagcgattctcctgccccagcctcctgagtagctgggattacaggcacgtgcctccacacctggctaatttttgcacttttagtagagacggggtttcaccatgttagtcaggctggtctcaaactcctgacctcgtgatccgcctgccttggcctcccaaagtgttgggattagaggcgtgagccaccgcgcccagcccattggcttgtttgtatgtctaccttcctaaacagtaagagggaacttgtctggtgttctttttttctctcctgtgctgacagcacaatgaccagtacctagtagttgcagtagcctttgatgaacaagccagcaaatggtacttttcttccttatctgaacataccatttattttgacttagattatattctcctgccttttaaaaagatggacttcagcagaaatctttatgatattggggaacaactggacagtgaagatctggcctccctcaagttcctgagcctggactacattccgcaaaggaagcaagaacccatcaaggatgccttgatgttattccagagactccaggaaaagagaatgttggaggaaagcaatctgtccttcctgaaggagctgctcttccgaattaatagactggatttgctgattacctacctaaacactagaaaggaggagatggaaagggaacttcagacaccaggcagggctcaaatttctgcctacaggtgggtggaaactcccattgtgggactgggaggtgtgggttgaatggacagcctctgagctgattggggcttttttttgtggtaccctgcctagtgcctgggaacccagcagtgccacaattctaagcttctacagaaagacagtagtgccttgggtggtcctgctaaaggctgtaaaacttagcttctccccaccctagagagagtgggtaaacaaaggcgtgagagagaaaccacattcagtatcacttgggaggctttgggaagatgtcccaccggagccagattaagaaatttaggggccttatatataattctatagaaatgctaagaccataaaataaaaatttatttttcaaagtgaaacattacttagaggtatgctgaagttataatagagtttttctaagtgttctcatttttttcctctcttatcttgatgcctctcgatatccagattgtgtgcttactttgcccatccattgagtaaagcatcatggcttcccaccctgaaatccccctcccacctgcttgcggatggctatgaaaattttcaatgagatttaagggttttctgccacacttaaagactcgaatgactaagttctttacggagctgtaagccgctggcctggcacatacagctaggcagtctccaccgaggctgcccagttcctgtgagcccggctgtatgacagttctaagcttctataggaagacagtggcacgttgggtcatcctgccaaaggctgtaaaactcagcttctccccaccctagggagagtgggtaaccaaaggtgtgagagagaaaccccattcagttacaacttcatgatgctgtgacaagactttaaaaacagaaacacattgtcactttctctctttcaacatctcctattatcggacactacttaaagcaattttagctttgctttcaggaaacttctactgaagtcttcgttctgggcccatttcattgtctctgtttgcttgttgataactatggcatgtgagatggaaagggttcacaaccagggctgacagctgctgtcctctgatggctcagcccatgaatgctctggtctttctattctcagagactattttttgttttgaggcttgactattttttgttttgttttgttttgtttttgagacggagtctcgcttcatcacccaggctagagtgcagtggcatgatctcggctcactgcaacatctacctccagggttcaagtgattcttctgcctcagcctcctgagtagctgggattacaggtgtgtgccaccatgcccagctaattttgtatttttagtaggacggagttccaccatgttggccaggctggtctcgaactcctgaccttaagttatccaccagccttgacctctcaaagtgctgggattataggtgtgagccaccatgcccagccaaggcttgaccattttgattttaagtgaaaaaagagatattctgggccgggtgaggtggctcacgcctgtaatcccagcactttgggatgctgaggagagctgatcacctgaggtcaggagttcaagactagcctggccaacatggtgaaacctcatctctactaaaaatacaaaaattagctgggtgtggcggctcacgcctgtaatcccagctacttgggaggctgaggcaggagaattgcttgaacccaggaggtggaggttgcagtaagctgagattatgccattgcactccagcctgggcaacaagagtgaaactctgtctcaaaaaaaaaaagaaagagatattctgggtatataagtttcctagggctgctgtaacaaagtaacacaaactagcaggtttaaaacagtttttaaaatgtgttttcacagttctggaggcctgagtcagaagtcaagatgccaacagtgttggttcccttttaagaggctccgaggaataatctttttcatgcctttccctgcttcgggtgggtggaggaatcctcagtgctccttgtcttgtagatgaggcacagcagtctctgcctatgttcccttctctgtgtctaaatctccctcttatgagacagtcactggattaggaattagggcccacctaatccagtatggcctcatctttgtgtgtgtgtgtgtgtgtgtgtgtgtgtgtgtgtgtgtgtgtgtgtgagacagtgtctcactacatcgcccaagctggagtgcagtggcatgatctcggctcagtgcaacctccacctcctgggttcaagcaatcctcccacctcagcctcccaagtagctgggactacaggcacccgccaccatgtctggctaatttttgtatttttttgtagagatggagtttcaaaatgttgcccaggctagtcttgaactcctgggctcatgcaatctgcccacctcagcctcccaagttctgggattacgggcatgagccactgcgcctggccagcatgacctcatcttaatgagattttatctgcaaacgtcctgggtccacataaggtcgcattctcatattccagatagacatgaattttggggaagaggggagaacactattcaaccagtacactagatagctttggtttactagcattgtgaagtctttataaggcacttattcattaaggcgccagttagtcctaaaaacccacagccccagaacaaggaaagccgaggggggtctcatcttgtgcccaccatcttggtcctttgaaggttccacttctgccgcatgagctgggctgaagcaaacagccagtgccagacacagtctgtacctttctggcggagggtcgatcatctattaataaggcaggatctctcttaaaatctttaatgtattggcttagagataaaagggtccgggcaatcctgacttactgcttgttcattatcattgaatactagccagaagctaataaatatgctagggtgaccacttaccattataagaaaacactagacattttattttccagttataattgctacctataaaataaagatcttataaactattcaggttcattactaaatggtgatggtacaagaaagcctataggcttcaataatgaggaaagcaaaagggtaaataccttgtaataaaggtgaaagagtcagagtagctttggattagatccaattttggccaaactgaaagctttagataaacacttctagggtagagagtccatgagaagggggataaggcagatggtaatactgagtaatttctgtttctacgccatttttattttcagaattttacttttctaattaaattttaaagtcaacgtgtttttgtattaaaattattttcctttacaccatagtattgaaaggtttgctgacttctaaaacattcctttgttcacctattcgacaagcatattccaagagcctaaatgtgccaatcacataaatgtgataggcatagattaggaaatagtaacacctatcactcattgagcacttagtgtgttgccaaagactgatttaagtacttcacataaacttatttgtgtaaccctcgaaaccttcctatgatgtggttacggataattatcttcagtctatggacgaggaaaaaatgtgtaacatgtctaaagttaacactgctcaaagatagtggaaccaaggctccaacaccaatagcctgggtccgctgagctcaatcattgcacctcacaaccctctgggtttatgaaaataaaaagggtacggacctggccactaggggacttgaacagtttctaaacagacaattattttctgtttttatttttagtgtggtggcatgatcacagctcactgcagcctcaaccttctgggctcaagtgatcctctcacctcagcttctggagtagctgggaccacaggtgcatgccaccacacccggctaatttttaaatgtttttggtagagatggggtcttgctatgttgcccaggctggtctcaaacccctgggctcaagtgatcctccttctgccttggcctcctaatgcgctggaattagaggcatgaaccactgcaccaggccaacagacaattatgtgtgttatcgttttggggttactaagtcatagtggagtgaatgcagctttgaggatgctcaggcaatgcttgagctgattgttcatggatgggcctctgcagatagacaaggggatggggtgtagcggcaccacagaaaggggtgagggcagggcagctgggtgtgtttggcttcaggtcctttcgtgtttgcggtctggtctgtgatagggatgtattcggagactttgtattccagaaccgaatgcttggccgtcttactgaagataatgactgggagaatactgaccagttttgattagggaagtcatgagccaatgtgcattttgaaaagcataatttccaaaaggcaaagcattttgctattgcaacaaaatctccattttacagaaaaaaaaaaaggaaaacaagatttactcaactgaaataaactgaaagaaaagttgatagaactttaaattgttaagggtgggaaagtcggggaggagccagtagacttctgtgtcaccacaccagcctctttccaagggctcaactcataaaccatgccattaactggctttatgttgaagggaggcctttggaatcaagcccactgtgactccatatatcaaatgggaaattatttgggaaaagatttctaaagtgtctccatttcccaccacagggtcatgctctatcagatttcagaagaagtgagcagatcagaattgaggtcttttaagtttcttttgcaagaggaaatctccaaatgcaaactggatgatgacatggtaagacctggtatcttactgagatttagtcctgagacttggttagccagggggcatttctgagaccaaagagaggggtattttggtaaaagcaacctggattctcactttttaactagaagaagaaagttgtcagcacgagtgttacagatgtgattcctttagaccgaagtgctgctcatgttaattattgggagcaaggcagagtcagaggccgggagaaggaggctgtgcagatgcagcccagacccggcagagctgggaaagactgcggtgggtctgagatatttcctccacttctgcagtccccgaaacaacctgggacctgaaactctgtgtgtatattgtgtctgtgtgttgtgtgtgtatttccgtgtctgtgtgtgcctttctctgtgtatagtgtgtgtctgtatttgtgtgtgatatgtgtatctctgtgtgtctctgtataagtggtgtgtgtgtctgtgtatctctgtgtgtgtgttctctgtgtggtatgtgtgtctgtgtgttgtgtagtgtgtattgtatttatgcccctgtgtgtgtatcactgagtatactctgtgtgtgttgtatctgtgtgtgtatgtgcatgtggtgtctgtgtgtgtgtgtctgtgtgtctgtatgtactcaggtctggagaggcaatgctgggggtgaggctgttccccagggtgtcaccatgatgaccgggctgctgtctcaggttgtttcacagtccccaagtaatgcattcgcaggagatttgagcacagggcctggggactgggtgacatctgacatggcttctcctttatcctctcacttctgtctttctgggccagaaaacatggaatcgcttccctagtagcctgctggctgtgagagaccagcagaaactgtcagaaacttgggaagcaagggcaggtccttggttggagaaattggaaattaaaaaaaaaaatctaatctaaaaaccagtagggctcaatccagattcccaactttatttctcctcctcttagaacctgctggatattttcatagagatggagaagagggtcatcctgggagaaggaaagttggacatcctgaaaagagtctgtgcccaaatcaacaagagcctgctgaagataatcaacgactatgaagaattcagcaaaggtagaaacaacctgacagccgggaatcggcaaaacctactctaaaattgaaactgacaaatcgctccatatcacagttgtttctaatcaaatattgtttggggtttccccttttaattcagagagaagcagcagccttgaaggaagtcctgatgaattttcaaatggtaatgcttggagatacattttcaagatttagttaatttactatctggtacctgcatgtgtcctccccacagccttctaccacatgcacatcttaacgtgcctgctctactttttctttttttttttttttttgtgagacagttttactttgtttcccaggctggagagcagtggcaccatctcggctcactgcaatctccgcctcccaggttcaagcaattctcctgcctcagcctcctgagaagctgggattacaggtgcgtgcaccaccacgcctagctaattttgtatttttattagagatggggttttactatattggcctggctagtctcaaactcctgacctcaggtggtctgcctgccttggcctcccaaagtgctgggattacaggcatgagccactgcgcccggccgcacctgctctcctaagacctgtagcccaagctggcaagtttgaaataggtgcagagttagtcagtagtaagtaatttaacatcattttttctatgtggctttttttttctccttgacgtgctgctcatgttatgcactgagtagctggatttaaattatgtttcataattttcttggttaagtcactttctctttcaacaccttctacactaagtcactcctttcaacttcctttcactttttctacctgataagcgaggctgaaccaagagagagagctctcaacgatctccttcaaaattttgattaatcaaatagtctttttttttttttgagacagtgtctcactttgtcccccaggctagaatgcagtgatgcaatcttggctcacaacagcctcgacctcctggactcagatgatcctcttgcctcaaccccctgagtagctgggaccacaggcacaagccaccatgcccggctaatttttgtatgtcttgtagagatggggtttcgctatgttgcccaggctgatcttgaactcctgagctcaagccatccacctacctgggcctcccaaagtgctgggactataggcaattaataaagtattctttctgattagaaaaattatatacactaattgaagattattttaaattcagagaaatttttacaagtccaagaacaccatcactccattcatattatgaatatttttattgtatttttacgttggctctttgtggtgtgtgtgtgtaaaatacattttggatcactcaaatgtattttaaagattaatgtctatgcaggctgtccttccctttcccctctgcctgctgagcctaaggccttaagaatactttaaggagtaaagtactaaatcattaattcatcctgagctagtggctttattaatgagtatctcacaaataccacaaaaattcaacctggccatgtggagcaatataaaattatggcatttcttggtatgtttttctctttggcgaggagacaacttgatcttgtgtttccagaagcatgttaattgccctgcttgcagaatctctctggcttgaaaggagattatattcatggcagtctgtgaattttcattttatttcatttatttatttgagacagagtctcactctgttgcccaggctggagtgcagtagtgcgatctcagctcactgcaaccactacctcccaagttcaagtgattctcctgcctcagcctcctgagtagctgggactacaggtggctaccaccacgcccggctaatttttttgtacttttagtagagacagggtttcaccatgttggccaggctggtcttgaactcctgacctcaagtgatctgcccatcttggcctcccaaagtgctgggattaccggcgtgagcccctgttcccagcttgaattttcatcttaaaaaagaccttatgttgtcctatgtgctacatatttcattaccagtgtacctttcctgccatgtctcattctagatgtgtctcttcgttgtttgcaggggaggagttgtgtggggtaatgacaatctcggactctccaagagaacaggatagtgaatcacaggtagacggaaacctccaaatccttttttttacattacagattctagttatttaatttgttagcttttttttttttttgctgccagataaactgacaaggggcagaaacttactgaaaattttgagaactgtagaaaaaattcacacaaaaaaagttaaaaatgtgacttaatttttaaaatgtgactccttcagttttctatacatttgaattttattttaagacccgagatgaagatactggaatagttggagggtggagggggtaataagcctcctaccaaatcttctagcagccgtgccagcctggatgggggagtggtttggagaaagagtctagcaggaatggaaaaagccaagccttttcctttagcttaatgtttcaaaaatgcttctccttggtgatgaggtgtaagcagcaaactctcacaatctagccatctctgtgtttttgtctcagtgaaccagcagaaacatgtaatttttaggcataataacttctctttatgtaatcaacaatccaccaaatacatcctgacttattagacgatctgctcctcctcatggtaggaagaagaggaaatcctgaatatctgaagtaggcttgagagagattattcactagtgtgggctcctgagaaaattaccagacctctttcatctgaaagtcaaggattaacccaagtaatgtggtactttctaaacagtatagcatgctacaagcattgtccccactgaagagctaaaaacactgtcttaatatcttagtaaatcttagtatctttttccttttttaatgttttattgagacaggggtcttgctacgttgccaagccaggtctcgaactcctggcctcaagcaatcctcctgccttggcctcccaaagtctgggattataggtactagccaccgtgcctggccaaatcttagtgtcttagtatctcagtaaatacacttaatatgcttaataaatacttagaacacaactgtaaataataaaaacttaacatacttggtacaaacttaatcaaatatttaatatcttagagttaacatattaagataacaggttatttgcccaaagtcataaggtgaagtagaggcaggaattgggcttcctagcctggagtccttttctccacctcaaggggctacgcagacctccaactaaatgctgagtttctcggtactgaaacagccctaggagaatgaataggacacagcgccatccctggccagtactatcaggtactacagtttggataccataacctacagtgtagccaggacctccctgaccagcccatctcttcccagcagccaccgtggtcctgagagctgggttaagccatcacctttaaaatcctgggaccacactgtgcaatgcatgaatgggagaccctcagctgttagccacgaagcacagatgagttcagtagacagccaagagaatcacaagtcatggcgtgggggcagccaaagacattcattcattcagtgactcttgattgagctctcacaagttaatacaccgtagtccctggcacagatgttatgaacctcaaggagtcttctgtatagtatgggaagcagaaatgagaacaaacaataatacaatgtgatgacaacaatattaatatatgtgcaaagtgctcaggaggcccaggtattgggacactgactttacaacgatggggcagaagtctgagaggtcctgtgtgaaggaaataggtagaaactagttcttcgaggaaacgaccccgagttggggtggtgcaatggaaagcaagtcctcttactagggagttgtttgtttacatctctagtgtttgacccacagagtcagctcctgggttgggtttttgttttccagactttggacaaagtttaccaaatgaaaagcaaacctcggggatactgtctgatcatcaacaatcacaattttgcaaaagcacgggagaaagtgcccaaacttcacagcattagggacaggaatggaacacacttggatgcaggtacagtagaacccaaaagagaaaagtaaaatatttcttatgcctatttttttttaaatcaaaagggagagaacaaaagctataccaaaagggccatgtttcaagaaaatggatttaaacatatttccctgtggaggtaaagaacattcttatacatttatcagtttcctgctttttttaaaaattaattttttaaataaaagtaatgtatgtataaatataaaatatcaaatcttactaaaagacataatgaaaagcagtaataagctttgttttgaattcagctaaatgcatagcgcttctgtggaatgtattaggcgatgaaattgctgtggtatcaaagttcttatagaggctgcatttttacaggttgggctgttaagtgcagcagaaattgtgggttcttaacagaaatagcattttcaagtattaaatattaaactggttagcaattcttttgctcagccaaattaagctaagatcaagaacttacaagttaaatgaaaaaacaatttgtagtatgtgaatataaaaagtgactacaacaacaaaaaataaaaatcatccatcaccattgagagattaataattttgatttgatcaaagaacttttggaaatagtgtttatcaggcataacatcaattattgatttgttttgcaaatggaggtaagtttagaaaattaatgtagactgattataatcatcaggagtctgtaatggcccctattaacattttttttttttttttgagacaaagtctcactctgttgcccaggctggagtgcagtggtgtgatctcagctcactgcagcctccacctccctggttcaagtgattctcctgcctcagcctcccaagtagctgggactacaggcacacaccaccacacatggctaatttttgtatttttagtagagatggggttttgccatattggccaggctggtcttgaactcctgacctcaagtgatccgcctgcctcggcctcccaaagtgctggaattacaggtgtcagccacctgtacctggtccctgctaacatttgatttgtttatttaagcaaatctaagcctttaaaaaggcacagagattaagtccattgattacatcattcgtcactatgcgcttggtattgaaaaaaatattttggacccttgatttgtattcttttaaaattaaaacatttctattaaaataacatttgcttctatttctggcagctcattttcttataactggcccatgattgactagtctctggtaggcattcgagtctgtgtgtcctgctttttctgttcctgttcttatgttttatgctgaatgagtaaaagtaggagacccagctgcagaagtcatttctcctgagagactcccttctgtcctgcttcagtgccttcagacttgctttacagtcatttttttaatcaacattccacatttccaaaggatcagaatttttttcacagaaccaacacactgtattagtcttgccaaagtgcttccaaatcaacaagggcctattgcatttcagttatttttttctattcctaatgctagactgtattttttcttttttttttttttgaggcagagtctcactctgttgcccaggctgcagtgcaataacatgatcttggctcaccgcaacctctgcctcccaggttcaagtgattctcctgcctcagcctcccaagtagctgggattacaggcatgtgccaccatacccagttaattgtatttagtagagatggggtttcaccatgttggtcaggctgttcttgaactcctgacctcaggtgatccactcgcctcggcctaccaaagtgctgggattacaggtgtgagccactgcacctggctgagactgccttttgactgatgacttatgtttagctctgatgtgctgacagggacaaaatgctggagaaggaataaaaaaggaataatccaacaaggatcaagagaacaggaaaggagacaatagctaatgaaaggtttccaacaatttgggggagttgaaaaaaaagagtcgaggtaattgacttaacagagaaagctacaacctcactgattacagaggggaacacggaaaggaggcaagcctatttacccccacagaatcctggaaaaattcagcaattggaagtacaaagtgtaggtgaggcaatgagcagaaaacaggaagattctttgaaagcctatataagcctatacaatcctctgattcataccttcctctcatagagccagcaactattcttattctaccatcataaggaacaggaagtttgttttctcataaaattgaaccagagaggctctacacttcggtgtgccaggcccagcaaaggaagcaatgaagcattttactgaacacagagagactgaagaaaacctgctggtggcatggagtcagatctctaaaccaacttggttccaagacactggcagcagatacagacttacctctggagaagctgaaagctctagctaaaatacatacagataatgacatctggaggtttcctaatgaaatgatcaggtccccaaccaatcatcttgctatgaaatccctcagagaacaagccacatccacaaacacagagctttcagtcgactttttaatggactaattagtcaatttatgaatggacaaccaaaggtcagcaggcatttgaagaaaggctctaatacgaaagagaggtagcttggtacggtggcgtgaaaatccagcactttgggaggccgaggcaggcgaatcgcctgaggtcaggagttcaagcccagcctgaccaacatggtgaaaccccatctctactaaaaatacaaaaattagccaggcatggtggcaggtgcctgtaaccccagctactacagaggctgaggcagaagaatcacttgaacctgggaggtggaagttgcagtgagctgagatcgtaccactgcactccagcctgggtgacagagcaagactccatctcaaataaataaataaattactagataaatgagaggcaatgcaaacaacaagaaaaacatgaaacagaatatgaatgaaaaaaagataatgttgagaaaaaagcaaccttttttaatgcttaatattggtatttagtattcttagagagttagttaaaggtccatgaaagaacaagatgttatgaaaaagggacagaacaagcaagtctccttgaaaattaaaaatttgagcaccaaaatgaaaaattcaataaagtagaagataaagtctaaggaagtaggataaaaagacaaaaatagaaaataggagtgaaagataagaaaatttgaagctaaatcaaggatgtccaatttttgacaataagagttccagaaagaaaggacagagaaaggggaaatggaactttccaagaacgaaatgacgcaatctccagattgaaagggtataatggattaagattcacttccaaacatatcataccctagaagcttctggaaagagaaaaaagtaagccaaatatgtaaagtatcagaaatggaaagtcttctctctagcaacactgaaagctaaaagactgtgaagaaaggccttcagaattctgaggaaaaatgcttttggaaatagaactctataaactaaagactcatacaggggctcaaaaaatgtacttctcatggttatgctccagcaaaggaaactgataagaaagaggaagtcatagatggaggaaacagggaacctactatggaagagacagagagatgtcccaggagaagagaaattcatctggcctatggaacagccagttggtattacagcagaaggatgcagtgctctggatggaaagttttccaggaagaaataaaaatgagtcagacaagtagcctgaaaatgttgaaagattttggccagatccattgagcacttggagaaaaaacagtgttaagcatataggaaacaaagcagatgaaaaaataatacaattacaagttccaggaaaggcaaaaaggttaataagaaaggaaacataatgaaagaacattatgtttacatagtcttaataatagaaatattactatgggccggaggtggtggctcatgcctacaatcccagcactttgggaggccaaggtgggtgggtcacttgaggctgggagtttgtgaccaacctggctaacatggcgaaaccctgtctctactaaaaatacaaaaattagctgggtgtggtggtgcgtgcctgtagtcccacctgcttgggaggctgaggcaggagaattgcttgaacttggggggcagaagttgcagtgagctgagattgtgacactgcactgtagcctgggtgacagagtgagaccttttctaaaaaaaattaaaaaaataaaaatattactatggattcaaccaaaacttgtaaataattgagtaagagcccaaatgcttattctccataataagaactcaatgcgaaagtctaaaatttataaatgagtaattagcagtgtacccaaattcattacaaaatggagctcaatgtggaaaaaagtggttaaaaactgaaagtggttgccttcatggaatgtgactaggtaatggggagggatagagaggggataaccttttgtataaggtcttctagttctatcttattaattcatatcttttattttgctatacataaataattttgagaaggtttaggataaaataagttggatcttttattcaaaaattgttttgtttttttctgattatgtaaataatataatcatttttaaaattggttcagtagtaagcctaaatgatagcttacccatcttgtaaactagtttactagagaaaacagaccaacaataacactctctcctttctcatttgcttcagggtttgagaatgtttttagctggtggcaataaatattagaagcctgcagaatccagctacgaatatagagggttttgctcttgaatttctggttcaaattcttttttttttttttttttttttattgatcattcttgggtgtttctcgcagagggggatttggcagggtcacaggacaatagtggagggaaggtcagcagataaacaagtgaacaaaggtctctggttttcctaggcagaggaccctgcggccttccgcagtgtttgtgtccctgggtacttaagattagggagtggtgatgactcttaacgagcatgctgccttcaagcatctgtttaacaaagcacatcttgcaccgcccttaatccatttaaccctgagtggacacagcacatgtttcagagagcacagggttggggataaggtcacagatcaacaggatcccaaggcagaagaatttttcttagtacagaacaaaatgaaaagtctcccatgtctacttctatccacacagacccggcaaccatccgatttctcaattttttccccacccttcccgcctttctattccacaaaaccgccattgtcatcatggcccatccccaatgagccgctgggcacacctcccagacggggtcgtggccgggcagaggggctcctcacttcccagtaggggcggcccggcagaagcgcccctcacctcccagatggggcggctggccgggcggggggctgacccccccaccgccctcccggacggggcggctggccaggcagaggggctcctcacttcccagtaggggcggccgggcagaggcgcccctcacctcctggatagggcggctggccgggcggggggctgttccccccacctccctcccggatggggcggctggccgggcagaggggtcctcacttcccagtaggggcggcccggcagaggcgcccctcacctcccggacggggcagccggccggaaggggggctgacccccccacctccctcccggacggggcggctggccgggcagaggggctcctcacttcccagtaggggcggccgggcagaggcgcccctcacctcccggacggggcggctggccaggcagggggctgatccccccacctccctcccggacggggcggctggccgggcggggggctgaccccccccacctccctcccggacggggcggctggccgggcagggggctgaccccccctcccccctcccggacggggcggctggccgggcggggggctgacccccccacctccctcctgggcggggcggctggccgggcagaggggctcctcacttcccagtaggggcggccgggcagaggcgcccctcacctcctggacggggcggctggccaggcggggggctgaccccccacctccctcccggactgggcggctggccgggcggggggttgaacccccacctccctcctggacggggcgactggccgggcagaggggctcctcacttcccagtaggggcggccgggcagaggcgcccctcacctcccggacggggcggctggccaggcggggggctgaccccccacctccctcccggactgggcggctggccgggcggggggttgacccccccacctccctcctggacggggcgactggccgggcagaggggctcctcacttcccagtaggggcggccgggcagaggagcccctcacctcccggacggggcggctggccgggcggggggctgacccccccacctccctcccggacggggcggctggccgggcagaggggtcctcacttcccagtaggggcggccgggcagaggcgcccctcacctcccggacggggcggatggccgaccacccccccccgcctccctcccggacggggcggctggccgggcagaggggctcctcacttcccagtaggggcggccgggcagaggagcccctcacctcccggacggggcggctggccgggcggggggctgaccccccccacctccctcccggacggggtggctgccgggcggagacgctcctcacttcccagacggggtggttgccagacggaggggctcctcacttctcagacggggcggttgccaggcagagggtttcctcacttctcagacggagcggccgggcagagacactcctcacctcccagacagggttgcggcccagcagaggcgctcctcacatcccagacagggcggtggggcagaggtgctccccacatctcagacgatgggcggccgggcagagacgctcctcacttcctagatgggatggcggcggggaagaggcgcttctcgcttcctagatgggatggcggccgggcagagacgctcctcactttccacactgggcagccaggcagaggggctcctcatatcccagacgatgggtggccaagcagagacgctcctcacttcccagacggcgtggcggccgggcagaggctgcaatctcggctctttgggaggccaaggcaggcggctgggaggtggttgtagcaagccgagatcacgccactgcactccagcctgggcaccattgagcactgagtgaacgagactccatctgcaatcccggcacctcgggaggccgaggctggcggatcactcgcggttaggagctggagaccagcccggccaacacagcgaaaccccatctccaccaaaaaaaaaacgaaaaccagtcaggcgtggcggcgcgcgcctgcaatcgcaggcactcggcaggctgaggcaggagaatcaggcagggaggttgcagtgagccgagatggcagcagtaccgtccagctttggctcggcatgagagggagagggagacggggagagggagagggagagggagacggggagagggagagggagaggggtcaaattcttatctatcaatgttatgcccactgtgctctccagctgtggtctgtgaattactgtggtataacgtgactgttcaaatttcacttttcaggggctttgaccacgacctttgaagagcttcattttgagatcaagccccacgatgactgcacagtagagcaaatctatgagattttgaaaatctaccaactcatggaccacagtaacatggactgcttcatctgctgtatcctctcccatggagacaagggcatcatctatggcactgatggacaggaggcccccatctatgagctgacatctcagttcactggtttgaagtgcccttcccttgctggaaaacccaaagtgttttttattcaggcttgtcagggggataactaccagaaaggtatacctgttgagactgattcagaggagcaaccctatttagaaatggatttatcatcacctcaaacgagatatatcccggatgaggctgactttctgctggggatggccactgtgaataactgtgtttcctaccgaaaccctgcagagggaacctggtacatccagtcactttgccagagcctgagagagcgatgtcctcggtaagttttgcctactcagccctcctcactgttacactaccttccccccctactccatcacactactatctactcatattcagagcctattagaaagtgctatgtgatttagatcacattaacaggtcagagaactgtccaaggggagtggtttccgttcaactctaaatgtctagctgtagatcacatagctgcatttcccaggtcagttacaaagtgggagagtggcaagtgttaacatccttagtttatagatggaaaagctgagatgctttattcctttattcagcacctcaaaggacaatcagggtatcacagagcaggaaaggataggaaagtcatatactccagctctctgtctttaggccaaaacatgactgagccaattcaactagttttggaaatcttccaagaaggcagtaacccaattcaatgtttaaacatcctccaactctgtcaaaagttctataatagcaaaccatcctcaaaacctcttggtgcattatgggagataaatagcaggttccttctagccctgtatttcatgttttgagtatatgaagagtgagaatttcccgtaacttagatcatgaatctaacttagatttcgtaacttagatcatgaatcctgcaaggtttccgcggctagctaccaaggtagaagaagaggttgcctaacaaaaatgctaagagatcctggtgagaagaaggtgggagtagctgcaggagacgttatactttcacttgccttaagtttaattgcatcaaagatgaatccgcagatgcgatgtcaattcgaggcagagagtattggggggcattgaagcaatggggagccaagtaacgtggagaagagtgagagacacacaggtcaggagagaaagaaaccaactctaatactgacaccgaggtttctgatggtcaaaagagttcctgaataaaccaaaagtaagttattaagctctgagacaacccatttaccaggaaagctggggtaggtcttggtttcgcaccttattgtttcaaatgactgatattttgagagaaagaactacagaactatctctgagcacagcagaggagacagttcatcagttgctttcccccacagacagtcacaatattatgtgatgtatttcagaggcgatgatattctcaccatcctgactgaagtgaactatgaagtaagcaacaaggatgacaagaaaaacatggggaaacagatgcctcagcctactttcacactaagaaaaaaacttgtcttcccttctgattgatggtgctattttgtttgttttgttttgttttgtttttttgagacagaatctcgctctgtcgcccaggctggagtgcagtggcgtgatctcggctcaccgcaagctccgcctcccgggttcaggccattctcctgcctcagcctcccgagtagctgggactacaggggcccgccaccacacctggctaattttttaaaaatatttttagtagagacagggtttcactgtgttagccagggtggtcttgatctcctgacctcgtgatccacccacctcggcctcccaaagtgctgggattacaggcgtgagccaccgcgcctggccgatggtactatttagatataacactatgtttatttactaattttctagattttctactttattaattgttttgcacttttttataagagctaaagttaaataggatattaacaacaataacactgtctcctttctcttatgcttaaggctttgggaatgtttttagctggtggcaataaataccagacacgtacaaaatccagctatgaatatagagggcttatgattcagattgttatctatcaactataagcccactgttaatattctattaactttaattctctttcaaagctaaattccacactaccacattaaaaaaattagaaagtagccacgtatggtggctcatgtctataatcccagcactttgggaggttgaggtgggaggattgcttgaacccaagaggtcaaggctgcagtgagccatgttcacaccgctgcactcaagcttgggtgacagaacaagaccccgtctcaaaaaaaattttttttttaataaaacaaaatttgtttgaaatcttttaaaaattcaaatgatttttacaagttttaaataagctctccccaaacttgctttatgccttcttattgcttttatgatatatatatgcttggctaactatatttgctttttgctaacaatgctctggggtctttttatgcatttgcatttgctctttcatctctgcttggattattttaaatcattaggaattaagttatctttaaaatttaagtatcttttttcaaaaacattttttaatagaataaaatataatttgatcttatt

SEQ ID NO: 28 - DNA, 46526 bp, Homo sapiens
tccctttttgacttaccaaggaaatggagatccaaaggaaagcctgaagcactttgtggcttccacgggttcgtttctaggaagcttttgctttacctggggaaaccccaagctctacagtgagaaagttgtaaattagcctttaggagacgctgtttgtcaaagttatcttaaccctggaaaaggggagggaaaaaggcagataagcagtgatgacatcagcaggaaactagtatcaggctacccagtcctgaagattcagttttcacttaaacaaccagcaagtcttgaagtctcttcccaagcaaatgggagcttctttggaccttggagcacacagaggattctactttctttaaaactttgttttcaggcaatttccctgagaaccgtttacttccagaagattggtggagcttgatctgaaggtatgtaattaacaacccttcttactccagagtctcatgcttgaatcttttcctttgcttcatggcttcgtgttgtagaaacttgcaaaaacttgtcagcaatggcactattttttcttagatttctttgtcatgcctgggaaaacaaaagttaaaaaatccggaagcctccaacatagccttttaccggggcagaaatatgttagctcacagagacaaagtttggtagactcactaaaactagagatcagaattgtcaagaaaccacaaggcaaatgctagatgcggtagaatagaaaggtgtctccaataaaccactcatttgacctcagggctagtagcagggaagatcccctggattatcacattaaaaatgacatttttttgtttcttttaacaccaaaagtaatgtgtatgctcacatatgcataaaatttgagaaattcaattggaagcccagaaggaaatttgtattatctatagttatgtcacctcgatataaccactgtttgttatggaggttttgatttttgctgtgtcttccttcctttatttatttatttatttatttatttatttatctatttatttatttgagacggagtctccctctttcaccctccagcactcaagctggagtgcagtggcacaatcttggcttactgcaacttccgcctcccaggttcaagcaatcctcccatctcagcttcctatgaagctgggaccacaggcatacaccaccaagcccagctaatttttgtattttttgtagagacggggtttcaccgtgttgcccaggcttgtcccgaattcctggcctcacagtgatccacctgcctcagtctcctgaagtgcttctctgattataatgaaatttagtatgtagaataccatagtttatagactagtcagatggaaacattgactcatgtaatttttatcttccttcgctgatttgagcaactcttgtctaaaatcaccctttccttctgaggtctaggaggtttttttgttgttgttttgttttgtttttgaggcagggtcttgctctgtcacccagggtggagtgcagtggcacaatcatggctcactggaacctccatccccggggctcaaatgatccttctgcttcagccctctgagtagttgggaccacaggcgtgcaccaccatgcctggctaatttttgtattttttgtagagatggggttttaccacgttgcccagtctggtcttgaactcctggcctcaagtgatccacccgccttggcctcccaaagtgctgggattataggcgtaagccatgacaccccacctgttccttcctttataaagtattttcttgtttctaaaaatagccaagttctgcatattgactacatacctcaagtgcttatagaataaatagtattacaatgaaaattttatcactgcattgctcctctgattatgatgaaatttagtatagagaatagcatagtttataaactgatcagatggaaacattgactcatgtaatttgtttttttttagtgaaaacaagtttattagagaagtaaagaaacaaaagaatggctactccatagacagagcagccgactcatgtaatttttaacttcctacactgatttgagcaactcttgtctaaaaccaccctttcctcctgaggtctaggatattttatttatttatttttctttttgaaacagggtctcactctgtcacccagggtgaagtgcagtggcatgatcatggctcactgcaacctgtgctccccaggctcaaatgatccttccatcctcggcctcctgagtagttgggaccacaggcatgtgccaccatgccctgataattttttgtatttttagtagagaccaggtctcgccatgttgctcaggcttgaggtctaggattatgccttccctttctgtaagataaaggcctgccctcttacaggtagcagtctgaagttaagatgtaacacacatacctcacggtaccttgctgtctttgggttgatagatcataaggataaccctgcctcccccagattgctttgtgtctaaaacttaaagcatagagccaagtgctatttctgccacgtgctggaaatgaatgtaagggctccaatcaggctaccaggcttgagaaaaattgtgctgtgtccctccatcttaactttctctctctgggaacattttgatttgggagaaatcaaggtgaattgaattccaatataagcaccctccaagtttcctaaaaagtaacttgcaagtgttggggaaaagttttctgggctgttgctttttgaagtagcctcgccgtaatttttatttttcagcacttctaggaaagtctaatgcccagaacggagaaggttgtggtgaggggagggcctgggaagtcagggggccatatgtcctcactctctaactccctgccccacctctctgtccctttcaggctggccatgaaatctcaaggtcaacattggtattccagttcagataaaaactgtaaagtgagctttcgtgagaagcttctgattattgattcaaacctgggggtccaagatgtggagaacctcaagtttctctgcataggattggtccccaacaagaagctggagaagtccagctcagcctcagatgtttttgaacatctcttggcagaggatctgctgagtgaggaagaccctttcttcctggcagaactcctctatatcatacggcagaagaagctgctgcagcacctcaactgtaccaaagaggaagtggagcgactgctgcccacccgacaaagggtttctctgtttaggtgaggacgggtctgtggtggagatgggaggatctcccatctagtgttcattctggccattgggctttgaaaggaagctgcagttaagatcttttggttatctacctccttggatgataaaccaggagattctaaacctccttctcagcctctgatgctaatgagataagagttgggaggtcagcaaagcttcaagaccaagccctgggcccagaggtggcttccctttgttttgcttctcactagcagtgaagcccacctcagtgtggcagagcccgtgttttccctgcttaccagcggctacacgtgcagatcttctccctcctgggatccactagtctgtctacctgtttcccggggtcttgagaagagagtaatgcatacttggagtgaaataagcaagatgaaaaaagagatgtgtttctggggtagggagggatgtcatttatgccatgtctagttatagaaatttctatatttttgggtgggaatccagaaaggtaaaaacaggcattttgcccaaagaggtaaaatttaggcattggtcttatcatggatgacagcgttttatttttattttgagacagagtctcgctctgtcactcaggctggagtgaagtggcaccatctcagctcactgcaacctccgcttcctgggttcgagcgattctcctgcctcagcctcctgagtagctgggactacaggcacccaccaccacacctggctaatttttgtatttttagtagagacagggtttccaacatgttggccaggctggtctggaactcctagcctcaagtgatccacgcacctcggcctcccaaagtgctgggattataggtgtgagccactgtgccaggctgatgacagtgtttaaaattgttcactgacatagtgtccacatcagagaacctcacgaagaggagcctttggagggtgttttatggtctctgcgattagaacacattaagccttagcggtggaactggcttccagaacctgagttgcccttgagtcagtggaaggaatgatgaattccagaaatccatatttccattctgctggctaaacatctgagggacagtctctgacacataggggtgttagtatgtggatgaaatcctcactgtttctggttgtggattatatctcgaagctggggtagttttcttcccttttcaatatacaaccgactgtaccttggctggcctggggtcctatctaccaagggcctgtaaagtaagcctgaatttcttgatggaatcaggagatgggaaggcatgtcagaattgtgttttatgcctttttttttttaaatatgccttcttagtgtggtgaaaaacagcattagacttggagtcagaaggcctgcttctaccacttactgtgttatctttatttaaacaagtcacttagaaactgaaagttttcattttttgaacctataaatgggattaataattgtctacacatagagttgatcattcaaatgacagaaaacatttatgaaagcacttgattgattatggtgtcctccacaagtgtaaggctttatttgtcattttgggtgtgtgtcttagaaacctgctctacgaactgtcagaaggcattgactcagagaacttaaaggacatgatcttccttctgaaagactcgcttcccaaaactgaaatggtgagtgggtcatacagaatgggtctgtgtgagcactgtcttaatcaatgattagaaagatgctggaaagggtttttagggagatttattttttatgggagacagtatcatacaatggttacgaacattggctttggtgctggatgagcctagattctggtcctgattctaattctaaacccatgctgtgaggccaatgattgaacttttctgagtctctattttcttagacgtaaaattgtgggcaatcgtatgacttccttctaggattgttgggagaattagctggaataatgttcatgaagcattagcatgaggccaatatttggtatagcattcagtaaatgctcacttctgttggaatctgttgtgttttgtttttgtttttgtttttttttgagacgaagtcttgccttgttgcccaggctggagtgcagtggcatgatctcagctcactgcaacctccacctcctgggttcaagccattctcctacctcagcctccctagtagctgggattacaggcatgcaccaccatgcccagctaatttttgtatttttagtacagacagggtttcaccctgttgggcaggctggtctagaactcctgacttcaagtgatctgcctgccttggcctcccaaagtgttgggattacaggtgtgagtcaccgcacctggccttgtccagttttttctttcaagtgccttttaatctgtaggttagatttcctccctgcccccaaatctctttctttttcttaaaatgtatctgttgaagaatctctgggcggttggcctgtggagtttctcacaggctgagttttgctgattgcacactcgtggtgcagtttggcatgttcctctgtcctctgcatttcctgcagactggcagctgaatccagaggcttcatcagactcaggtcagatccgtttggcaagactataggtagtcttgttttttcatcaggaggtacctgattttctctctctttttctttgatattagcaactgttgatgttcaaccattttatatattgaattttgaggggttgcaaaaatggagatattagaatttttttttttttttgagatggagtctcactcttgtcacccaggctgaagtgcaatggcacaatttcagctcactacaacctctgcctcctgggttcaagcgattctcctgcctcagcctcctgagtagctgggattacagcagcctgccactacgcctggctaactttttgtatttttagtagagatagggtttcaccatattggctaggctggtctggaactcctgactttaggtgatccacccgtctcggcctcccaaagtgctgagattacaagtgtgagccaccatacccggccacatattagaattgtatcatttcgttttcccttcatccattatttggttacccagtgatacagcttatatgtgaatccttgattcttttctttcagttattttttttttttttttgagacggtgtctcacttggtcatccaggctggagttcagtggtgtgatcttggctcactgcaacctctgcctcccaggttcaggtgattctcctgcctcagcctcctgaatatctgggattacaagcaggcaccaccatgcctgtctaatttttgtatttttagtagagacagggtttcatttggccaggttggtctcaaattcttgacctcaagtgatctacctgcctcagcctcccaaagttctggggattacaggcatgaaccactgtgctttgcctagttatccagtttttaagttaattggtatcttatcattctctgaaggtgacccattacaaaatatatataaatttaaactcatggatttaaacatatgtgaggtatttcaatctactgcaattattatccttactgaagttcaaactgaggctgggcatggtggctcatgcctgtaatcccagcactttgggagtctgaggtggacaggtcacttgagcctcaggagtttgagactagactgggcaacatgacaaaacccggtctctacaaaaaatacaaaaattagctgggtgtggtggcgtgcacctgtagtcccagctcctcaggaggctgacatgggaggatcgctcgagcccagagaagtcaaggctgcagtgagcaatggctgtgccattgcactccagcctgggtaacagagtgagaccctgtctcaaaaaaatagttcaattgtcccattttttcccaggggatacatcttcagtttggttcctaagtcattttgacatgaccttagtagtctttgatggcttctttactatctggcaaaaatatcccaggttcatcttgtatattttctacccagtcctggaatctctcatttctcccaaaaatcctgacttcttttaatgagagatgtcatttcaagaccacaaactcgatgctggcatgctcattgcttttgagtaaatatatatgcacacactacgtatatacacatatgtatacacacacacacacacatgcacacacacacatgacctaaaggttcagtaattcttggagaattttaaaaatcaggcgattttgttttagggaattcttttttataaaacattgtaaggatcttctgcttttgccgtaaaatttcagtgcccacatttgcagtggtacaaagcaattacctgctcaaatggtagcattataccttaaatacagaatttctcaaagtcagaggagattcctgtagtttgacaagcgctccaggtggttttcataacattctctcccaagttggggcatccgctcacaaattttccagtgtctaggtttatacataaaatgagaccactttttattgttataccccgtcctatgttagggactctctgaacaatatgaggtggcgggtgagggacgagagaaaggtcatttgttaaagcaatctctgatattcgaaacactgagtgttagttttcaaacaagaaaagctggaaaatgtttttttttctcttttgcttgcacaggttctagaactctacttgaaggcatctgtggctacagaattattattattattattattattatttttagacagagtttcactcttgttgcccagtctggagtgcaatggtgccatctcggctcactgcaacctctgcctcctgggttcaagtgatcctcctgcctcagcctcctgagtagctgggattacaggcgcccaccaccacacccagctaatttttgtatttttagtagaggtggggtttcaccatgttggccaggctggtcttgaactcctgacctcaggtgatccacctgcctcagcctcccaaagtgttgggattacaggtatgagccactgtgcctgcccagaattatttttatggtcagaagcattccaaacatttcccccctactaaaatagcttttaaatgatcaaatgcacatgttcatgtggccaaatgatcttgtttttctcagtataacagtaaaaggaaacgtaactgtgcttagctgtggcatggaattgtgatattaccaggtcaaattcaggaaaaccatatttcctctttggattccaaatgatctcagcttttttttgttgggggcggggtggggagatctcattttttgtgtcagaattgtggctgagttacacacctcagataatccaggttgatctgtattggattttgcaatcagaccagcctttggaagtgtgtaaaggacagtctctaagcaacacagatgtttccacaccagggctcagtgaggctgcattatctgcaactgcaattgcaaaagaccttatcacagaaataaattacttacccaccattggaaaagggcctgaacacccctcagccaaaacggaaaggttctaaattcttacagtctctctggggaaacacaaataaccttgcctttgaggggcattctgggctttgtctttgatagctttcatagaaatgtaagcagtatagctggcctacacatatcctgagagatctcacaactgtcaggaaatccgttctcagcacagcaatcagcatacaacattgagtctaaaggaaaccacacctgaacttactctttaacaaaaaagcaaaaaaagaactttcagatgtttgctgctagtatttgccagagtggtgttaaactaatgtccaggtcccatttaagtatgtgcgtgtgtatgtgtgtgatgtactaaacatctaataaacttttagaaagtataatgaatttccgtaattgcttctggaatcacatcttagccctttattcctcctggtaggatgctgtcaagacatgagtttctggcctggcagggtggctcatgcctgtaatcccagcactttgggaggccaaggcaagcagatcacctgaggtcaggagtttgagaccagcctggccaacatggtgaaacccatctctgttaaaaatacaaaaattagctggatgtggtggcatgagcctgtaatcccagctactcaggaggctgaggcaggagaatggcttgaatggaggtggaggttgctttgagctgagattgcactactgcactctagcctgggagacagagtgagagactccatctcaaaataataataataataataataataataatagctgaattgtgattttttgtttcagaaaattctttttcttttaaaatatcaaatataaaattctttcgaaacattttcccctcatttctttggtgtccctcttttgctggcttcctaagcagtatcatttaaagctgtgacttagagttcagtggttaataacatagactttggcatcagattgtaccagctctgccattaattagctttgtgaccttcggcaagttactggaatttctttgtgcctcaattatttcatctttaaaatgtggattataataatatctacttattcagttgttgtgctgttaatatacagcaagcactgtccctgttgcatagagttatatatatatttggtatctggtattaatatagattgtatacagatttgcttggtaatgcctcttcccctacattcctgagcaacttgagggcagatgctgttatatcttatttatcagtgcaaaacctagtgcctactggccatgcagataacatttgagtgagtggataatcaataggcaagtaaatgtaactctattgattctcttgtagacctccctaagtttcctggcatttctagagaaacaaggtaaaatagatgaagataatctgacatgcctggaggacctctgcaaaacagttgtacctaaacttttgagaaacatagagaaatacaaaagagagaaaggtaagtagcttgtgattgctaacttggaccagaccatggaaattcttaaaccaattggccatgcatgatgttttgattatttgttttgttttgttttgttttgaggcagagtctcactcactctgtcacccaggctggagtgcagtggtgtgatcttggctcactgaaacctccgcctcccgggttcaagtgattcttctgcctcaacctcccgagtagctgggattacaggagcctgccaccacgcctggctaatttttgtatttttagtagcgacagggtttcactatgttggccaggctggtctcgaactcctgacctcaagtgatccacccacctcggcctttcaaaatgctgggattataggtgtaagccaccatgcctggcccgtgcatgatgtttactcatcattctgataatattctgctaggaaagccagaaatcttccccttcgttcattcaacacatattggttgagttcatattttgtaccaggcactgttttagaagttgaggatatagcaaagtacagagcaaagctcctgccctcttgcaacttatattccagtgcagggaagtagttttagacaaacgtctttttctgattctaatatgggagtgagagtatagggaattattttaaatgaaataacatgaaaaagaaggcaggatagcatggggtaagagtggactctatagagtcggattgccaggactccacttactagtggtgcagtggtacttttttggcttttctatgtgtcactttccctatctgtaaagtgggcataataattgtacctacctcctaggtttttgtgaggattgaatgagataatttctgtaaaatgcatgtctggcatggagtaagccttctatacatgtggctattatggctctctcagagagaaaagtcataaagacttcacattctcagaaactactatcaaaaaagaactttattttcttgtgtgtgtgtgtgtgtgtgtgtgtgtgtgtgtgttttaagtctgtctgataaaggtagttctgctgtgatattttatacagatagaagcacagggcaaaagtcaaacctggctgccttaccacgtgtcagtacgctaaatatctgtgtttttctgagttcatttctccactgttaagcaagcgctatacataaaaactcatgagtgtattcatgaaacttttatgccacacccttaatttagttcagtgagtgactctagtgtgcaaatttcttggttgaaaatgaaactagctaagaggaaatgtctgtctaagaatttggttaacacagaatgagttgaggagcaaaatatactgttgtcaaactgataaaatctcaaacaataaaatgatgaataaatgcataatttaagttatgaagaataaaaacagttctttctatcatcaaattatcaaatgagaaataaaaagcagaaggttgatatggaaagaatatttgaaatcctcacatgagctctgagtttttttctaaacacattgtcatttttctgtaatgccatatcccatataaagtaaacatagggcaagtggtcatattattctggatatttaaattctaaagaagacacactagtttctatgtagttgattacatttgcctcagtgagtcttgaagactgagctttgttttttttatttttattttttgagatggagtctcgctctgttgcccaggctgcagtgcagtagtgtgatcttggctcactgcaagatctgcctcccaggttcacaccattcttccgcctcagcctcccaagtagctgggactacaagcgcctgccaccacgctcagctaatttttgtatttttagtagagatgggatttcaccatgttagccaggatggtctcgatcacctgacctcatgatcagcctgcctcggcctcccaaagtgctgggattacaggtgtgagccaccgcgcccggcttgagctttgttatttttatttttatttttatttgagctggagtcttgctctgtcgcccaggctggagtgcagtggcatgatcttggctcactgaaacctccacctcccaagttcaagcgattcttctgcctcagcctcctgagtagctgggattacagatgcccgccaccatgcccagctaatttttgtatttttagtagagatggggtttcaccactttggccaggctggtctcaaactcttgacctcaagtgatctgtgtggggattacaggcgtgagccactgcgcctggtccaggactgagctttatatcagcagagttctagttttgatttttcttttctacaacctacctgtgtgtgatctcttttgggtgtcaatcattattgatattttaatattgactttctttagttctaagagtttgagcctaattctgctgttaagatgaaagactaaaggactaaagagtaggtgtgcagactttagacttttctgtaagtgtgtgtgatccaaagtccaagctaggatactggctttatttaaggaccacctggctaactttctaagttgtcttgagccttggtgtttgcttcagtattttttttttcttttttttgagacggactcctactctgtccccaggctgcagtgcagtggggcaatcttggctcactgcaacctccgcctcctgggttcaagcaattctcctgctgctagtcagaaggtgatttttatttttctgtctgtgattttattttcagctatccagatagtgacacctcctgtagacaaggaagccgagtcgtatcaaggagaggaagaactagtttcccaaacagatgttaagacattcttggaagccttaccggtaggttcagtggtgtgctggtcaatgcttaacaaccggctccaccctccaacctcccctccctgccaccccaaaaaagaaaaagagagagaggccccggtttgtaccatttattgtaaatggtctcaccatggtgattgcaagtaaacaacatgatatcaaccagagtgcacattttctgaaaatttaacagttggctgacactagctgactagtgagagctagttagtttgagttctcgctagttagtttgagctgactccccacacccctgagttgctctgaaatggttcctctgttcttatctgtgggatgcaattagagccagctttagggacatataatctatggagcacagggcgtctgatagtaattccacagttcaagtacagagcttttgtttaatgctctgctgttactgctttgaaattcttaatgtattgaacaagaggtttgccaagcatgtagctggccaacccagagggcaagggtttctggtttctgtggtgctcagctctgaaaggatgggtggaaggggaaacgttgggagaatttgcagtctgttcctcaccatgtgatcatgatccttgggagatatgtgacagtcttccctgggatttgtggttcttccagcagacttgggtaatttctttgccaacatctgtcagcatcaatgaagttagcttggtctgggaaatgttttgtttttgttttcaactgtgataaaatacacataacaaaatttaccatcttaatcaattttaagtatacagttcagtaatgttaaataccttcacattgttgtgcagacattaccaccatccatctccagaactttttcatcttcttttagtaaaactttgtacccattaaacaataacttctcattttctccttccctccaacccctggaaaccaccattctactttctctctctataaatttgacttttcagggtacctcatataagtagaaccatacaatatttgttcgtttgtgactagcttatttcacttagtgtaaagtcttcagggttcatccaagttgtagcatatctcagaatttccttcctttttaaaggctgaataatattccactgtgtgtatatacagtaagtcctcacttaaaaggttgatagatttttggaaactgaatttaagtgacagcatactgtataatgtatttatttttatttaaaatttttttttatagagataaggttttgctatgttgcccaggctggtctcaaattcttgggctcaagcaatcctcccgccttatcctcccaaagtgctgagattacagccatgtaccaccacgcccagccacataccatataatgaaaccaattttaccataggctcattgatataaacaagagttggccaggcatggtggcccacacctccaatcccagcactttgagaggccaaggcaggcggcttacttgaggccaggagttcgagaccagcctggccaacatagcgaaaccccatctctactaaaaataccaaaattagctgggcgtggtggtgcatgcctataatcccagctactcgggaggctgaggcacaagaatagcttgaacctgggaggtggaggttgcagtgagctgagattgcatcactgcactccagcttgggcaacagagtgagaccctgtctcaaaaaacgataacaaaaagccctaagagttaagtttctatagcatacagttcgttgtttcacttaaaggcggagttaccaagaacctactgatgactctgagtgaggactcactgtattacattttgttgtccactcatccattgatggactcttgggctgctgccaccttttgactatttttaataacgctgctgtgaatgttggtgtaaaaatatctctttgaaatgctgctttcaattcttttgggtttgtatccataagtggaaatggtggattatatagtcattctattttcaattttttgaggaaccttcattctattttccacagtgactataccattttacatttccaccagctgtgcacacatcctcagcaacacttcctcaccaagacgtattattctctttcatttttgatagtaggcatcctaatggaagtgaggtcctatttccctgtggttttgatttgctttccttaatgactagggctgtcgagcatcttctcatgtgcttttggcgatttgtatatcttctttagagaaatgtctgtccaagtcctttgttcattttctaattcggttgtttgtagaagttttatttttaattcttttttttttttttttgagacggagtctcactctgtcgcccaggctggagtgcagtggcagggtcatggctcactgcaacctctaactcccaggttcaagcgattctcctgcctcagcctcccaagtagctgggattacaggcgcgcatcaacacacctggctaatttttgtattttttaatagagacagggtttcactatgttggccaggctgatctcgaactcctgacctcaagtgatctgcctaccttggcctcccaaagtgctgggattataggtgtgagccaccgtacccggcctttattttttaattctttttttttttttttttttgagactgagtcttgctctgtctcccaggctggagtgcagtggctcaatctcagctcactgcaagctccgcctcccgtgttcacaccattctcctgcctcatccttccaagtagctgggaccacaggcgcccgccaccacgcctggctaattttttgtatttttagtagagacggggtttcaccgtgttagccaggatggtctcaatctcctgacctcgtgatccacccgcctcagcctcccaaagtgctgggattacaggcgtgagccaccgcgcccggcctatattttattcttaaaaattcttttatggcttctttactattgtcatggtctgatatttttacagttacaatttttagatttaaaaataatttcaattttatagaaaagttgcaagaatgtgaataatataaagaatacctatgtactgttttcctagatttacctacctgttgttgatgttttaccccatttgctttattatttttgtgcatttactcacacttgctctctttctccctttctctccacacacacataatttttttctgaactttttgagagtaagttgcatacatcatggccttttactcctaaatattttcgtgtgtatttcctaataataaggatattcttttacagaactataacacaattatcaatgccagtaaagttatgttaatataatacttttatcaaatcaatggtccatattccaattttgtctgttgaacccaataatgtccttgacagtttttaaaccatctagtacaaaattccacataggatcctatataaatgcaacacaaggctgggtatgttggctcacacctgtaatcccagcactttgggaggccgaggtgggaggaccacttgaggccaggagttcaaggtgagcctgggcaacatagtgagaccctctctaaaagaaaataataaaaattaaaaatacaatataatacaatacaatattgtatttagttgtcatgatcctttagtctcctttaatctttttttttttttttttttttttgaaactgagtctcaccctgtcacccaggctgaagtacagtggcatgatctcggctcactataacctccacctcccaggttaaagcaattcttgtgcctcagcctcccaagtatctgagattacaggcatgcaccaccacattcggctaatttttgtatttttagtagagatggcatttcaccatgttggccaggctggtctcgtactcctgacctaagttatctgcctgccccagcctcccaaagtgctgggattacaggcgtgagccaccatgcttggcatagtctcctttaatcttgaacatttccacaacttttatgacatttaatttcctcttttatgccattgagacttttgaagaatgcagtcactcctcccacctttcattaaatagaattttccttatctttggtacatgtggtatttcctcataattagattcaagctgtacgttctggccagaatatcacagaagtgatgtgtctttctcagggcatcccatctggaaatacgtcatgtccatctgcccccctattcgtgatgctaattttgattatttggtcaagatattttctgatattatcactctgcagttaattttatatagttactattttttccccacgcaattaataagcaagtgctggagagacattttaagattctgtaaatatcctgctgcacatgaaaagtttccccctagattgagcgtctgctgatgattcttgtgtgatccagcatttactatgttggttgtaaaacaatgcttttctgactccagtattctctccacattcgtaagttggctctcagcattctactgtaaagaaggaccctcctttctccccaggaaggtgtttttgtttttttaaatgaaggagaccgtggaaactcgccagatgacctgtagctcctggagcttggcaaaggctgggcaaacgcccacctgaagactatgcaggcaatcaggacatgacacagagccgggagaggcctgctcttcggctctgccctgaacctcattcggcaggtggaggtatttaggcatttgagggaatctcagctttgggaggccactttgtaagtgatcttaagagattaagtacatccttaattaaaagaaatggtaacacctccgcctgcttgctgtgagtttattcatttgaattccccatctcccccaatgggaaataacacagaattgcaattatttataaaatcttaaattggcttcttttctctaggaaaatagcccttgattcaattaattccaatcctagaaaagcgcctagatatctgattgaggtattgagggagagaggctgctccccttgattcttttactataatccaattaaagcaacatttatgggccaactccctggccatgggcacagctttgtttagagagttgcaaatccattcccacctccccgctcccccagaagctctttattattttattttatttatttatttttttgagatggagtctcgctctgtcacccaggctggagtgcaatctcagctcaatgcaacctcagcctcccgggttcaaatgattctcatgcctcagcttccctagtagctgggattacaggcacccgccaccatgcctggctaattttttttgtatttttagtagatacaggatttcaccatgttgacttaaggtgatccaccctcctgagtctcccaaagtgctgggattacaggcatgagctattgtgcatggccatcccagaagctctttaaaatgtggttttccagcactgacattttaggattccctaattctaagttaaattgtctgctaaatgtaactcttcccacccactttttcaacttgttttgtgctcagatactgacatgcatgtagaaacacacacacacacacacacacgattctgctcgttgtctttgagaaattcagtggtttctaaaggggcatggctcagctgtggcctctgaagcgctgtggttccgctgacgtgggatgataacttggccacggcacatgcagtagggggatagtcgtggcagtactagaagtgcaaaggggactggggcacagcatctcacgtgttttcacagacttttaaggttggaaggtgtcttaaaagttatctgggcagccctttccctctccatcaaatgatgaataaaataaaacttggtgaaacatctcatgtttcttaagcacctgaggattttttttttaaatttaaaagaacactgccaataattgggctcaatgagaaggaactctcatcgaattttaagcaacatctcctaatatgtttaaaaattaaatttatttttttctcagccccctgcaacttcagcctcccaggttcaagtgattttcctgcctcagcctcctgagtagctgggattacaggcacgtgccaccgcacccagcaaattttttgtatttttagtagagatggggtttcgccatgttggccaggctggtctcgaactcctgacctcaggtgatccacctgcttcagctcccaaagtgctgggattacaggcgtgagccaccgtacccggccaaatcgatttttttgagtgtggcataaggttttcttaaggagaggcatgtctctctatggaggagacctaacacctgcttctttataaggccttattggacccctcttgaaaactatcaaaagaagttgaaagatgattcagtgtggccaggctgtgggacattcactcattcattcattcattcctctctgacatagagacttgagaggtgtcaacagaggatgcaacattctcgggagaagaaaggcagattagaccttaaagcttttttctagtccctgttctggctgactttatcagccaagggaagaacaaatcaaggaaagccagggcctggaggggctgggcagagcctgctgctgtgtctgcattgcccctaatcccagaagactcactcaactgctggacaaaaccagaaggcagtctggccaggcccttgtctgcctcttagaagaaatctaggattctacaggaagggaacagtggcttatgaaaagaaaggcaggaagccttttggaaagtgaagctaagcctcctttgcatttgttcctgcagagctgggggaacagctcttccccaacaccttggtcaggtccccttgggggctttctgctgaaggctgacggctgagagtcatagggggaagggggtgatggtgaatggggaggagggtacagaaaagacagggtcttagactttgttttaattttgtatttaattatataaaacattaatgtatgcccaaggtagtgcatccttgcctctcctccccacctcgattgccatttttatttgttttttgatttatcttattacttttgaaaaaaatccaacgtatatcttccctttattacaaaagaggtagtgcactcaaataccatttcattttgctttctccatatgacagcatcccctggagaagggtatagaggctgtccttggcatcttactccactatgtggacataccacagctttttcaatcacttcctattggtggacattaggctatttccagtccttagtgtaaataatgctgcaatgagtaagtacccttgagcatatgtcacactgtatttttgccagtgcgtctttgtgaaccttctcctttggatggagagagttggttctcttcccatttcctgccaatgaactttcttttttttttttttttgagacagagtcttgctctgtcacccaggctggagtgcagttgcgcaatctcggcccactgcaacctctgcctcccaggttcaagtgattctcctgcctcagcctcctgagtagctgggattactggcatgcgctaccacacccggctaatttttttatttttagtagaggtggggtttcaccatgttagtcaggctggtctcgaactcctgacctcaggtgatccacctgccttggcctcccaaagtgctgggattacaggcatgagccaccgcaaccggcccaatgaccttttctgtggctgtggattagatatctgtccttccctgcatcaagtctagtttttgttcctcatcctaactgtgtgaaattcctatgtttcatgccctcctttcttttttctcagcaggagtcctggcaaaataagcatgcaggtagtaatggtaggtatttctaatgtactttttacaacttagatcggtatggtagggatagacatatttgatatataccaaggaattcaaggtgacttggaagagaagctttataaataatgaataattcattttttattccaattcaaggcaagacattgaatgcatggattgtactaggcttttctatggcagtatggagagggctgggtggtttctgctctgaatgcctagtatagcagattctagggactgcaggcggctgttcttcctccacccttcagaattaggccaccctctgtgcagcagaaacagcccccgcagggctgaagccttcaggccagtagtgacagcagaatgtgcagtctgggtgcgtgtcctctatggagtggttccagatgttgcttcagagggagagaagaagcaagaggagggacttgaggatggtgtgtttagttccctgaatccctgcccagaaaccataaccttaggaaaatattccagaatctgccatcaggttaaactgcttatgaacaaacaggctttggcgaagtctttctgtggtatgtaaagtttgtcacagaccattcctcatttttttttctggaaaattatccttcagagtccaagacacacagctttgctagcaatttgtctttttgcctaacacggaggttgtgtgctatgatgttggtgacattgaccaggtcaccattattaagcacttgtcacatactaggcactgttcagagagatttcagggattatatcatttattcctccattcactggaggtaggtaatactgttattctcactaatgatgaggaaactgagacccatgaaatctagtgctttgcactgcagctaaaaggcaccgcagctaaaaagaagtgaagctgggatttgaacccagctgtctgattccagagcttactctcctaaggccaggctatcccagtgtctatttatgtgagctcaggtgactgcttcacccctctgaagaataaagcagtttctttcagctttacaattctgcggttccaacatttagacgtgacttcccgtggagcattaccttctctcatggtgaggaggaatttataggtgctctgagccactgaagcgtggatcccttttgctgtattttctggtctggggaatatggacttgctcagcctgaggactgacccttagcagtagttaataactaactcatgccccagagacaaggacagagtttggtgggttctactacaaacttcctgtgagtggaaaaagaaaactgtttgatgttacattttcctgttagtgccatgtgacaaataatgcattgctgactttctctctgtgatagagtcttttccagaggaatcagggagttggcaggaacacttcaaagcagtgtgatcctcagtcgatgcccaactggaactttctttttcccctcttttttcttttcttttcttttcttttttttttttttgagacagggcctcactctgttgcctaggctggagtgcagtggtgtaatcacagctcactgcagccttgacccctcggactcaggtgatcctcccacctcaacgtcccaggaagctgggactacaggcaatgtgtcaccatgcccagctaattttttgtattttttttttctagagatggggtctcactaagttgtccaggctggtcttgaactcctgggctcaagcgatcagcccgtcttggcctcccaaagtgctgggattacaggcatgagccaccacgcccagcctccctctttttccttctctagggaagaggtccacctagcctctttatatccagtgacataaatgctgactcaatccaaccatacttgagctggaagccttgagctgatccatgggatcttaattaattccccacccaatccctgccagcagcatagtttccaacccagacaaagcaaaaaagaatgcgaagacacatcagtctctcccatcaggaagggcatggtggctgaatttgtctcaggagggccttgagagaagcataattctccagaattagatgcgaaaattatcagtgaagaaatctaagtgcttggggaagatatttggagtctgagtacctctctttctaggtaacagagccacaaatggtgcaccaagcctggtctccagggggatgcaaggagcatctgctaacactctaaactctgaaaccagcacaaaggtctggatggtttcttttattccttttttaataaaaaaattttttttccaaatttaatcaaaaggacggtttctttaggggctctctccctagggtccagccttcgatgattttaagggctccgagctgtttgtttcagacttgtttctccctctctctgtaattatctctgttcttcccacctttttctgtatcaatcagaagtgactgatccctttgactgtggaggaaatgctgttacactttgagtcatgcataccctttgggttatttctggagaggggtagtttcttttcttatccattgaagccacttgttttctgcttggataaagatgtaccacgatttcaaggatgattttagctgcccagaggctctgctaaagccagctcagctaatttgcaatcacatgctgtttacaatagccttaaaaaataattgcacatgtttttaaattcctactgtgaatatatatatatattgaattttaaaaattgaatatacagccatctttatatacatatgaatatatatcagccatctttatatatatatgaatatatatgtgtatatatatactttatttataagtatactttatatatatatacttatatattaagtgtatatatatatatacacacactcatatatatattcacatatatataaagatggcggtctcactgtgttgcccaggcttgtcctgaactctcaggctcaaggaattctcctgcctcagccacccaagtaccaccatgccagcttgtatattatttttatattcagaaataaaattacaaaagatttcccttttttgaaggcattagatcactccagaaatgaaccatctgaaaaaaatctttgatatttatgttgtctcatgaaatccttgtgtatgctttcttcattcatgttgctaatatgaaagtgaagatgcttttgcataaaccctgggtttgacaatattaaaatatatattccattttcttaactgtcatgattgagcttctccagccaaaccaggtgaagtctgaattttaatcaggatctggcatttcaccttggaattaattagctaattccacactagggccaggatcttgagaactctctgcctctgatactgggagtggcatcctgaaagaaaggaactgtctaatctttagtgcaaatgagatttatcctttgtcctgggctctaggacttaaaaaagaatctttgaaattttattcagatcacaattgtgcagtaaaagtgagttgcagagtagtcagaatccccagtttttcaatatgtgacttcagaaataatgtggcataaataccccaaggggtttagactagagtataaaaacatggttttggacaggcatggtggctcatgcctgtaatcctagcactttgggaggctgaggtgggcgaatcacttgaggtcaggagttcaagaccagcctggccaacatggtgaaactctacctcaaccaaaaatacaaaaattatcggctgggcgcggtggctcatgcctgtaatcccagcactttgggaggacgaggtgggcggatcacaaggtcaagagatcaagaccatcctggccaacatagtgaaaccccgtctctactaaaaatacaaaaattacctgggcatggtggcgggcgcctgtagtcccagctactcgggaggctgaggcagaagactcgcttgaacccaggaggtggaggttgcagtgagctgagatcacgccattgcactccagcctgggtgacagagcgagatgctgtctcaaaaaaaaaaaaaaattatctgggggtgttggtgggcacctgaggcaggtggatcccttgaatccgggaggcagaggttgcagtgagccgagatcgcgtcactcactccagcctgggcaacaagagtgagactccatctcaaaacaacaacaacagcaacaacaaaataacaacaacaacaaaaacatggtttaaacaactggcatggggagatacatcctgctcttcctcacagtggatccattggagtggttggttagaaacatttaaggccctaagataaggattcctactaagtggctctatctattcttcaagagggcagctgtgtacaggatgaatcggaaccacagaggcctctgtgtcattgtcaacaaccacagctttacctccctgaaggacagacaaggaacccataaagatgctggtaagaaagtctggaacagtttatcaaatgcaaattggggatcttaaaattattttttattttcacattttctttctgtgacttttatcttccatatacgtgtaaggatgatatcatgtttctgagcctcttatatatccctggggagtcatcagtctgctaaagagtggcaagaatctttgactattcacaattctgaatagaggagagcatgtactgggggagagcctgctggattggcacgagacaacttgggcgtgagctccagctccaccactaactaggtgtgtgatcatgggagagtcaagagaccttggcttcttcaactgtgaaacaggatgaaacactggccactgccgattctcaggactgttgtgacaacactgggtattacgtgataggagattcattgtaagattttatggttatgaaaataaaaataatccaaagctttaggctatttgctgtgcaaattttgtaactattagcattgtttcagttttttttttctttgagacagagtcttgctctgttgcccaggctggagtgcagtggtgcagtcccagctcactgcaacctctgcctcccaggctcaagccattctcgtgcctcagcctcccgagtagcagggattacaggcgtgagccaccacacctggctattttttgtattttcagtagagatggggttttgccatctggccagactgttctcaaactcctgacctcaagtgatccgcctgcttcggccttccaaagtgctgagattataggtgtgagccactgtgcccggccttgtttcagttcttcattttgttttgcatcattttattatttcccctttctctctctctctctcttttttttttttttttgtttttaaacagagatcctgagtcatgtgttccagtggcttgggttcacagtgcatatacacaataatgtgacgaaagtggaaatggagatggtcctgcagaagcagaagtgcaatccagcccatgccgacggggactgcttcgtgttctgtattctgacccatgggagatttggagctgtctactcttcggatgaggccctcattcccattcgggagatcatgtctcacttcacagccctgcagtgccctagactggctgaaaaacctaaactctttttcatccaggcctgccaaggtgaagagatacagccttccgtatccatcgaagcagatgctctgaaccctgagcaggcacccacttccctgcaggacagtattcctgccgaggctgacttcctacttggtctggccactgtcccaggctatgtatcctttcggcatgtggaggaaggcagctggtatattcagtctctgtgtaatcatctgaagaaattggtcccaaggtgagagctcttttttttcttccatttgtaattaattagttttatttattttttattttactctcattcaacacctttggtaagggtgagagttctacgttgttctatccatgtacctgttcaaccatctgcctaccctcctgtttatctatttatccatctatccacccattcatctatccatccatctatccacccattcatctatccatccatccatctgtccatccatccatccatccagcaaccttgtattgagtaccagcctggacctggaaaggaagatacagagttaaaaaaagacagagtccttgccctcaggttgcttacaagctagagggatagacaaacaaatagacggggaagggcatccccagctggtaagtgcacattgtgaagtataggtgttatgggaacatgcagaatgagtaccttgcccagatttgaaggatcagaggaggcttctagaaatgacaaatagatgttaggtaaagaatcaggtgaaagatgtgctgggcagagggaatagcatgaacaaaagcatgggggccttttatttgttcgtttatttatcactcactcttacgtcctgagcacctatgtgctatctttggacttctatttgccactgctctgacagcttcccttctgtctctgccacatgctgtcctcttggcacctttagccatacctagaggccatgggctcctccatgaaaacgtctccaaagttgccatctctggcccactcatctctgaattcctgggggcagagaccctgtttcattcaactttatatcctcagcccctgacctgatatattgtgagcttgttaaacatttgctgggccaatgaatgacttgcttgagcctgtctcattaacatcccgctagatatcctacctctgtttagcccttggacctcacattcagcatgcatgtttctgagctcatcttcccagctctctccaggagctcctactcctgaatttccatttgaaggaatggccatagtgctcttctgggaattcaggattggaaccttgagtcaactttgcttttctctcttctttaccagcccctccattctcatcacagacatcagaggctaatgtctatggcttcaggaacaaggcaatatttattgagagcgtactatgtgcttactgtactgggtaccgaactggggacagggggtgcaactgtgtacaagagagacaaaatctgctctccagggagctaaaagtccagtgaaggaaggacagataataaaaatataagtgaatatttaaattattattattttaaaaattcaacaatattaaaaggagacagtatacatgcatgattaagcaatgtgtggttttttttggtactccagaaatttctgttatttttaattgatacttcataactacatatttcagggttataatttgatgtttcaatacatatatgtgttgtataatgatcaaatcagggtagttagtgtatccatcacctcatgcatttatcatttctttgtggtgagaacctctaaaagcctctcttgtagctattttgtaatatacaacaccttactgattgatcgattgatttaaatatgggatctcaccatgttgccgaggctggccttgaactcctaggctcaagcaatcttcctgccttagccttgtaagtagctaggattatatgctcaaaccacagtgcccagctcagaatgccttactgttaaccatagtcaccccactgtgcagcagaacaccagaggttatttctcctatctaattgtaactttgtacccattgactaacctctcatcttcccttccctccttctctctctcatctttgtaattgctgttctaatcactgcttctatgacatcaactttttaaacaaagattccacatgagtgagaacaagcagattttttctgtgtcttgcttatttcactctgggctcattcatgttgtcagacatgtcaggattttctttttttatggctgaatggtattctgtcacgtataaatatcacattttctttatccatatatccatttttggacccttaggttgattccatatcttggctattgtaaataatgctgcagtaaactgggagtgcagatatctctctgacatattgattgcattttctttgtttatatacttagtatggggattgctggatcatatagtatttttatttttcattttatgaggaactggcatactattttccataatggctgtactaattttcaataccaccaacagtgtgtaagtgttcccttttctccagatctttgccaatatgtgttttcttttgtttcctcgataatagccattctaacttgagtgaagtagcatctcactgtgggttttttatttttatttttatttttttttagacaacatcttgctctgtcaggctggagtgcagtggcgcaatctcagctcactgcagcctctgcctcctaggttcaagcaattcttctgcctcagtctcccgagtagctgggatcacaggcatgtgccaccacgcctggctaatttttgtatttttagtagagacagggttttaccacgttggccaggctggtctggaactcctgatctcaagtgatccacccacctcagcctcccaaagtgctggtattacaggcgtgagccacggcgcccagctgtcactgtggttttgatttgcatttccgtgatgattagtgatgttgaggggtggaagcgggtaagtaggaaaactcccaccacaactatagtgctagagtgaagtagggctgagactggggttgggccttccaaggcggaaggaagtcaggggtggaggccaagttgggctgattttcctgctgctgctaagagaaaaccaattaatggaagaaggttgggggtagggttaaggataagtatttgttgaggctctcatgtattggatgatgagaggaatcatgctatagctaaaataaagccaatgtcaccaatgcgattgtatagaattgcttggagggctgctgtgttagcatctgcttggccatgtcatcagccaattagtagaaaagatataattcctacaccctctcatctgataaagagttggaaaatgttgttggcagtaactagaattaatattgtggtgaggaaaataagtaggtatttgaaaaactgattaatgttcagatctgccttcatatatcatattgagaattctataatagatcaagtgataaatagtgctactagaataaacattatggagaattagtctagtttgaagcttaatgagagttttagggtttggattgttattcaatatcagtttgagatgatggtttcttggtctgtacacataaatgttgtgggaatgaggctaatggtgaaagtgcatgcgacagctatttttacatagtatggatatgagttctttttgtgagggttgataaaggtaataataattggtaaggttaaggagattaaggttattatagtaatggaaaaatacatgattattacttttatttggagttgcaccaatatttttggttcctaagaccaatggataactctcatcctctaaaagttgagaaaactatgttgttaggcatggaggcatgagttagcagttcttgcaaactttatcggtaaataagaagttgcggacttctattattagaccacaatctaacattttgattaaactatatttacaaggtataagtcctataataattttaggatttagagatagtaagagaattggtgaaaggtgtatgagtattagtatgttttctcgtgtaaaggaaggtttaatgctgttaatatagtatgttagtgttccttgttgtgttgtgacaagtatatagagggaataaagggctgtgattaatatattaagtcctataagcatgatggtagtgtttgatcaggagaatgaagccgttgttacaaggagttctcctactagattaatagtggggggtagggcaaggttggtgagatttgctgtaagtcatcaaaaggttactagtggaagtaatgtttgacgtcctcgagagagtaatatgattcagctgtggattcacttgtagtttgaatttgctaggcagaatagtagggacgaagtaagtccatggggaattatgaggataattgcactggtaaaacttcagggggtttgaatgaggatagccacagtaacaagtaccatgtggcttacggaggaatgtgcaataagtgactttagatcagtttgtcgtagacagatggagcttgtcataatatgcctcataaggataatatcaggaaaggataggctatatgttctgtcagagggctgaggatgagggtaagtcgcattttgtgtagccgcccaattttaggagcactgctgcaagtactattgagccagccttaggtgcttatacatgggctttgggaagtcataggtgaagtcagtataggggtatttttactatgaaggccattatacatgccaatcacatgagattgttggatcaggagattggtagttcttgatattaaatgttattattatcatgctcagtgagcctaggatattttgggcataaataagtgtaataagtagggggagggatcccactagtgtgtaaaataagagatatgtacctgcattgaggcgttctggttggttaccccatcgggtgataataattaagatagggataagtgtagcttcaaagagaatataaaatataattagttctgtggctgtaaatgctatgattagaaaaatttgtagggaaattaatatggaaatacagggttttttccataggggtgattcactggagaggtggtactggcttgctatagttataagaggtagtagtcaggctgttaagattagaaggggtgatgttagcggatcagaggagaaagttaatgagaagttgaatagattgtcgttgaattagttaaagaataatagggcaatgaagctggtgattaggctgtgggtagccatattgattcaaattgtataatttttagagagtcatgttattggtagtagtataattgtaggaatagttatttttagcattgaagtaaatttaggttatgtatgtagtctaagccatatatgttggaaattgaaagtagcaaagcaaggcctaccctggctttgcaggcagcaaatactggtagagtaatgggtattacatttgctagggtgaagtgtatatttaaagctataagggtatttactatgaataatgataatattattccttctaggcataggagggatgatattaggtgggactgatagactaatacccccagaagtgatatgataaatgctaatatgatacttatgtaaatagagggcatttggtaagtatgttctatcataatctaatgaaatcatttattttgccttaaactacttatttttttcttatacctgtggaccatttgtatgtcttcttttgagaaatgtctgttaaagtcttttgcccatttttaaatggggttatttgtttttttgctgttgagttatttaagttccttatgtattctaaatattaactccttgtgagatgtataatttgcaaatttttttcctattttgtaggttgtctcttccctcggtttttttttttttttttttttttttgccgtgcaaaagggttttaatttgatgtaaactcatttgtctatttttgcttttgttgtctgtgcttttgaagtcttgttttaaaaatccttgcccaacccaatgtcatgatatgtttgccctgttttcttgcagcagcttcatagtttcaggttttacatttaagtcttacacattttgagttggtttttgtttatggtgagaggtaagtggttagtctcatttttctgtgtatggatattcaattttcccagcaccgttttttgaagagattctcttttacctattgtgtgttctgggcacctttgtcaaaaatcagttggctgtaggtgtgtgaatttatttctgggatctatattctgttctattgatctatgtgtctgtttttataccactaccatgctgttttggtaactctagatttgtagtatattttgaagtcaggtggtgggatgcctccagttttgttctttttgctcagcattgctttcactatttggggtcttttgtggttccatatacattttagggtttttttccctatttatgtgaagaatgtaatttttttgtttgtttttgttttgttttgttttagagatggggtcttgttatgttgtccaggctagacttgaactcctgggctcaagcaatcctcccacctcagactcctgagtagctaggactacaggcatttgccactgcacttggcttgtcactggtattttgatagggactgcattaaatctgtaggtcaccttgggtagtatggtcattttaacaagattattcttctaacccatgaacacgagatatctttccatttatttgtgtcctcttcactttctttcatcaatgttttatagttttcagtgtttaatatttaagttaatgatattttaattgtttaatatttatttaataattttattattcaattattatttaatattaatttaaataatatttaaattaataagaaaaaattagccaggtgtggtggcatgcacctgtagtcctagctattagggagtctgaagtgggaggattgcttaagcccagaagtttgaggctgtagtgaactacaatcgcattaccgcattctagcctgggcaacagagcgagatcctgtctctaacaaaaagaggcaatttcaggaagtgatccctgccatgaacaaatcaaaacaggataatggtagtttcttggtggaggtaatatttcaggtgagactaaatgataagaaggaaacagacacaggaagatttgggaatagagagcaggtgcaaagcaagatgcagggattgagagcaggtaagggcctgcatcccttccctgaaaaatagtgatagttaaggatgaggggatgagagtagtcatactaatactaaaaatgatggtcagcagaacagtgtagccagtgttctaagtgcttgacccaatatacatcctttaatgctctcggcaacccctaagatggggactgttatggttcctattttagagctgggaaaaccgaggcatggagcagtgagtaaccagcctaagagcacacaatgaatgaatgatggagccacaatttaaaattgaatgtgttttcagaacctgtgcttgcttccagtgatatgtattgcctaccctgagaacgttctgctaaatgctatatgtcctgcaagcccaggctcaaatgctaccatctgcatgaagccttctctctccctcccaaccagaaatgcattctcctctgaacttgcagtggaaccttgacctttcatttggtgttgaccacattctgccttgtgttatgaatattgtgtatatgccatcctcggtaaatgtttcatatctgcattctaagtggttaacttcaggaattgtgtcatgtctatctttgtatctctcccaagactacagatagagagggcattgttggtatctgtggcatctgctgcatatttgttgatctaagacctggtacatggtacctggtgtcttttctaagacctggtgtgtggtttctacctcctgactgaaaaaagtttcttctctgggccaggcacagtggctcatgcctgtaatcccagcactttgggaggccgaggtgggtggatcacctgaggtcaggggttcgagaccagcctgggcaagcaatatggtgaaaccccatctttactaattagccaattgtggtggcaggcacctgtaatcccagctactcgggaggctgaggcatgagaatcacttgaatccaggaggtggaggctgcagtgagctgagatcacaccactgcactccagcctgggcgacagagtgagactccgtaaaaaaaaattttgttttcttctttgttgcagacatgaagacatcttatccatcctcactgctgtcaacgatgatgtgagtcgaagagtggacaaacagggaacaaagaaacagatgccccagcctgctttcacactaaggaaaaaactagtattccctgtgcccctggatgcactttcattatagcagagagtttttgttggttcttagacctcaaacgaatcattggctataacctccagcctcctgcccagcacaggaatcggtggtctccacctgtcattctagaaacaggaaacaccgtgttttctgacacagtcaattctgattttctttttcttttgcaagtctaaatgttagaaaactttcttttttttggagatagtctcattctgtcacccagactggagtgcaggggggcaatcacggctcactgtagtctcgacctcccaggctcaagctgtcctcccgcctcagcttcccaagtagctgggaccacaggtgtgtaccaccgtgcccggattttttttattctttattttttgtagagatggagggatctcactttgttgcacaggctggtttcaaactcctaggcccaagtgatcctcccacctctgtccccaaaatactgggattataggcacgagccaccacacctggccagaaaactttcattattgaagacttggattgtagccttggttttggatgtctattctgaagacagagtaattggctttggtttgtgcaggtactttttctttgagacagagtcactccgtcacctgggctggagtgcagtggtgggatcactgttcactgcagccttgacctcccaggttcaagcgatcctcccacctcagcctcccaagtagctgagactacaggtgtgtgtccatgcacagctaactttttattttttttgtggagatggggtttcactatgttgcctaagctggtctcaaactcctgggctcaagcgatcctcccacctcagcttctcaaagttctgggactacaggcatgaaatactgtgcctggcctggggaccaggtgcattttaaggttccttggtgttcaaaaaccacgttcttagcctagattgagcttagattgcctctctagacaactaccccttagttataattctgtgtcccctctgcatgcccttaaacattggacagtgaggtcacagtccacccaccctctctctgatctcccccttcctaagacttctcttttgcacatctagtgaggtgaaaatttggtctatgccaggcccatttcctgcttttgtgtaaggaaggtgctcacataggaagtttttatttggttagagacaggtttccctgtaggaagatgatggctcatttacactcagctgctctgcaagcagaaactttacaacctgatgtcatattccattttggactgggtgcggtgactcatgcctgtaatcccagtactctgggaagccaaggcaggcagatcacttgaggtcaggagttcgagaccagcctggccaatacggcaaaacctcatcattactaaaaacacaaaaattagccaggtgtggcggcgagcacctgtaatcccagctactcgggaggctgagacaggagaatctcttgaatccaggaggcagaggctgtggtgagccaagatgacacaactgcactccagcttgggcaacagggcgagaccttgtttaaaaaaaaaattcaatattggggttggaacatttcagttgccattgacagaacacccaattcaaattgactgaagcaaagaagggaatttattgcctctttcacattgaaacccaggagtggataacactggcttcaggcaaagcttgaatcaggactcaatctacaggccagcacctttctcttggccggatgtcctcagggctggcagatgcagtagactgcagtggacagtccccaccttgttactgctactacactttgctcctctggcccaaggcatgaggagagaggctgtgtcagaaactgaagctgttctcaggatcactgggctcttcttggcagaggggatgtctggcttgcctgaagggagtggctctgtaaggacgccttgatgctttcttcattaagattttgagcatttttacgtacttgagcttttttttttttttttttcaatttctagaggaactttttctctgttaattcctggaactgtattttgaatccttaaaggtgagccctcatagggagatccaaagtcctgtggttaacgccttcatttatagatgaggcagctgaggcctggggatgtgaacaacctgctcacagtcctcatttactggatttgacttcagccaggtgaactggaatgccttggggcgtggaagggcattaggagtgtttcatttgatatgtgaatgctcataaaaaaatgtcaaggaatgaagaacaacaactctcagtggtgcctgcatttataattatttatgtgaaagtcaaattcatgtacagtaaatttgttataagaatattcacaagaacactgttctgatatctctgattgtcatgtggatttgaatgtagcttgacagagggaatgtctaatctatattgacagggcaggaacaccgtcatcttagacaaacaccgccactttaagttccagttccctttctagcctcatgcatttcaaggaaatcacttcttttctaacagcgagcagccagaaagagaagagagtaaaatacagataagacagctctggcatagagggaggtgggggggtgggggaagtctcttgggtaactgccaaactttgccttcatacaatgggttccaggaaaacaatgagccttaataagcacattcctttcccttcaggtgcactaagtggggaagctaaaagcagactggaggggggtggggtgtacctacagctgcagaaatattgtatgggaacggacacacaactctccctcccagataagcacagcaaagagacatagaagcaatccaagcctctgataaactctcccaccctaaatccttaaaaactcttagtctgtaagtgagtgggctctgacctaactcggccagaagcccctttcaaatttgttttctctaaaataaacctgtccttggctgtcaagccacctttcatgtttctttcctctttctttaattcttacacatgtgtcaggatgatctcccaaaaccgtgttcataacagtcagggccaaaagctagtggtcacagtccttgtccagttggcagaactgacatgtgaaggcaagtgaaggatggtgagatactgaggaaagagcaaaggatctggagatcaaagccctgcatttccattttgtcctgattcctttgctcagagacactaactaaatcaagctagcttttttcagccttgtctgtaaagtagagaaaacattagctgttgggaagacgaaaaagaatgtgtcctatgtgtgcatctatttaaatctaactgtgctgaggtgcatataaatgcctttaggtggtagggtcttccggttgtaactgcaacagaaatagcaggacttaagttcctttgtgcgtaattccagctgactttattagcggcaactcagcactagcattacccctgacatactctgagtaagatctaattcttccctcactggttcgtgatgtctaccgcagcagaaggccagctcttgactctgagttcagttggacaaaatgctgttgataaaacctcctgtcaggcctctgagcccaagctaagccatcatatcccttgtgacctgcacatatatatccagatggcctgaagtaactgaagaatcacaaaagaagtgaaaatggcctgttcctgccttaactgatgacattaccttgtgaaattccttctcctggctcatcctggctcaaaagctcccccagtgagcaccttgtgacccccatccctgccagccagagaacaaccccctttgactgtaattttccactacttacccaaatcctataaaacggccccacccctatctcccttcactgactttcttttcggactcagcccacctgcacccaggtgattaaaaagctttattgctcacacaaagcctgtttggttgtctcttcacaaggacgcgagtgaaacctccttcatcaggagcatttggggtttgatgtttaagttttgggcctctggtgtatttcatatttctgttttgctagaacttagtgcttgtgcaaggttaaattctagaatcaggaaacgttgtttttaggggccttcagcaagcacttcggaggtccctggacgtttacagctgtgagtcgtggatctacccagacatcagaacatagtcatccttggctcattcctcctccgtaggaggggtacacagttggtagagtgtgccctccaagatttcgtgaaacattatgcttgtctgtatttgtgtgtgcatgtctgcgtgaattttgagttcaggaataacaggtgatttgatcacagctatttgacagtggtgatagtcattgtatgccaagatgtttatgaggggaataggtagattgagtgaggttcatgtatattttgcctagttgtactcacctacaagagctgtaattaaatgtttctctctttccccttcctctcttttattcattcttttttttttttttttgacaaagtctcgctctctcacccaggctagagtgtagtggtgtgatcttggcttactgcaaccttcgtctcctgggttcaagcgattctcctgcctccgcctcctgagtagctgggattacaggtgtgcaccaccatgcctggctaattttcatatttctagtagaaacagggttttgccattttggccaggctggtctcgaactcctgacctcaagtgatctgcccactttggcctcccaatggaatgaaccattgtgtctggcctcattcattctttctttcataaaagtttggatactgccaaacaaaattaaagacatgaagacatttgataaattgttattacaaatgtgacagttatttaactactggtgtttatttttattagagtcatagcacctactggcctctgcttcagggattcacaatggtgttgggcaggttggatatcatggggcttacccttagcaaggcattctattccacctatgcccaggcggtgtaaaacatataagcatctggtacgctgtggtaccgacccagtgactggtataacacaatggttaaggttgccaaatagcaacccttaatcaataatgatcaaatctccacggaggtaaactaaactagaagtttacctcatacaggtaatttttgtgccatacatgattcacagaaccttccagatctgatgctttctgagtgatctggtcaatttgttctcaacctggaattcttgggcccttaggtgtttgtaaatttgttctcagagactctgagctctccaccttcatttttaagtgctttaattctttttggtgataatctttaaaacttcacagaggtgtgtcctggctctttggggcgactgcttcatatttgagtactgccacacaatgacagctcatgttctggggcctgcctacagaaagggatgaactttatcttggaccttttaatgtagtgtggatgggcgtctgtagctggaggtcttcaggtgccagtggttaatctgtttgaagcttgcttcactccaacctctcattctgtaacagactcctcctccaccgtccctcacctctgctgaacccttctagcagagggaactcaccacaagtgggggatggatttgggagcttgaaaggaccccaatgaccctgcagtccagccctcaaagtgctaagtgacttactgaagcctcgaagccatttctggaggatttgcaattctttgtatctctggatttgctgccctgtccctccaagccacctggtttcacttttggacagctttaagtgttctcttctctgttctctgtttctgccttcttagaaactatttaaaaccactcattttcattctaaactccggagccataccaaacaactgtaactgtcctctggtgagatttgcgttgtatgtgacaaatcttttaacttttttctgttagggtttcagttttgttggaagtctgcagtttgctcttaaggatgtgataagaatgtaacaacacatttgtatctttgaattttgaataggaaccaaatttttaaatttagtttagttttgttttgtttgagacagagtctcactgtgtcacccaggctggagtacagtgatatcatcttggctaactgcagcctctgcctcctgtgctcaactgatcctcccacctgaacctcctgagtggcagctggggctacaggcaggtgttttttaaaaatggaactcttttctttttttttttttttgagacggagtcttgctatgttgcccaggctggagtgcagtggctcgatcttggctcactgcaagctctgcctcccaggttcatgccattctcctgcctcagcctcccgagtagctgggactatgggcgcccgctaccacgcccagctaattttttatatttttagtagagacagggtttcaccatgttagccaggatggtctcaatctcctgacctcgtgatccgcccgccttggccttccaaagtgctgggattacaagcgtgagccaccgtgcctggccaaaaaaaaatggaactcttaatacattagaaaaaaaatgaaatcccttttaaaaagcactagaggaaattctgtgtttaaagatttacttatttggcaatgcaaacaactgtttatttcctaacataacttttgcaaatctgaatttttatgaaaagatttttaaattaaaaattttaaattgtactaatttttactttttaagtaattttgagtaggtaatatttttataaagatatttgtatggtttgaagataagaaaattaaaggtgttcaagaagagttttgcccccagttctgtccactgtatacccagtcctccccacttctgcatacatatttcagacaggtatttcttggaagaaagaacatatgctgtgaaacttacatgtctcagtaggtctcattttaagtgattctgtaaaatgcctgggaaatactggtgaaattctagaatggaaataactttgtgagattttgagctgagtactggtaaatagtagaaatggacttactaataaataagggaattttatttgataacttttttctgattacatagtaatgtatgttcattatggaatatttgggaaatacaaaaacacaccaagaaaaaagtatatttatttataattctattttgctatgtattttcccattattcactctgtgtttgtcacagatttttccccaccctttttcaatgagtgtatcctccatgtccccccaatcatgcatccagtaaactttgtcattactaccatctgtactttcactcacgtttcaattccaagcatgtccctctctgacaaccacctcccatcattccatcttgcttcttctaggaccttcccttcaaggatcttcagtgccaccagggcttccagttaggttgactgaccctatctattgtcttcccgatgtcagcaccgcccctcactccctcttcattcagcttagagtccatgtgtctttgttaaagtctcctgtacccaccaacacccttgcctttctgtcagttccactgaggtggtagaatcccaactctggttaatcctataaatccttgtcctccaaatttgtactggaattccaggatgtggctggggtaaaaaccttccatgttgcagacaggtctcgtttcaaaccaatgaccacaaacctccaatgggctttcaggggtttcggcaatgctgtgacatttccctggttatatcacccttttgcactctcggtctgttttactaatcatcgaattctctatgatctcaacctaaaaggttagagatatttcctgagaagccccaccttttctcttgataacccactatggagctgtcatttgtgaatttaagaagaaacacttgcctcttgactattttaaaacatcaaaaacaacatttaaaaattgaaggatgaggccggggtgtggtggctcgcgcctgtaatcccagaactttgggaggccgaggcaggcggatcacctgaggtcaggagttcaagaccagcctggccaacttggtgaaacctgtctgtactaaaaaaaattagctgggcatggtggcgcacacctgtgatcctagctacatgggaggctggggcatgagaattgcttgactctggcaggtggaggttgcagtgagccaagatcatgccactgcactccagcctgggtgatagagtgagactctgtctcaaaacaaaaacaaaaacaaaacctgagggatgagccacaaactgggaaatgatatctgccacgttgtataactgataaaggagatatatgtacatatactatatatataatcttctataaatccataaaatattaaacaatccaacctagatgggcaaaaatataaactagttcaaagatgagcaaaaaatatgaaccagtaattaaaaggaaataccaatgagcaataaatatatgaaaacataaccattctctttggtcatcagagaatttgaaaaatacagccacagtgagatagcattttatgtccatcatattatcaacatttaaaactctgtcagtaccaagtgtgggtgaagatacagagcaaagggaactctattacatcgatctaggaaatgtaaattgacacaatcattttagagagcaatttgcaatatttataaatgttggaaatttgcacacagtaaaatctagcaattccatttttggatctatgtcccaaaataaacttaaaaacattgttttgtagagacagggtcttgttatgttgtgcaggaaggtcttgaactcctggcctcaagcaatcttcctgcctcagcctcccaaagtattgaaattataggcgtgagccaccacgcctggccccaaaagaaatcttgcacaggtaccaggagataaggaggaagtgttagttttctgagcagcattgtttgtaaaagtacaaaaaaaaaaatgaaaagaagcaacacaaacaatctatatattcatcaagaggaggatagataaattgtggtatagtcatataaaggaatactatcaagtagtgaaataaaatcaattagaattattaggctgaaccatatgaaattgccattcttctagatcagaaacaaccaaatattggcaatttcatacagtttaaatatatgtatcagtaacataatgctgagcaaataatatatataatatgatatgatttatataatgttaaaatacacataagagtcttttatgttgcttataaattaatatgtatattgtacaaatatacagatgcatgggggtgatgagaagtttagagtagtagttgcctgggatgggattgggtcttggggggacaggggggaacatgccaatggggaggaattacaggggcttcaaatgcatcagtcatgttttatatcttcaactgagtgctagatgtggggatattctcttttctctttaatcctttttgcgtctcagtgctgattaatggaatttagccaccagattgggtgattttttggcttgttgaatagttggccaggtttgcagggaagctttgccctcttgggcagagtatgtttttccaatctagtaactgtctgtttttggtggtgatttctgtggctgtaattaatatgatcagtgttgccaaagcaaggataaggggtattgactcactttttattgccctgagccatccctgttgcaaaataatgatctggatataatctccagaccaggaagcaagctgcagatgggaaactcccttatgacacttctgaagatcccaaacagtttctttttttaatgtaatttgattttttatttatttagttttgagatggagtctcgctctgttgcccaggctggagtgcagtggcacgatctcggctcactgcaagctccacctcctgggttcatgccattctcctgcctcagcctcccgagtagctgggactacaggtgcctgccaccatgcccggctgttttttttttgtatttttagtagagacagggtttcactgtgttagccaggatggtgttgatctcctgaccttgtgatccgcccgtctcggtctcccaaagtgctgggattacaggtgtgagccaccgcgcccggcccccaaaccggtttctaacaaataagtgttaagtcaaggggttcctctacagaatcagtcatcttcaccatgacacccacaacgcccaaattgctgctggcattcctccactctgaatgcacaattagaagctcagcactctattggataaggctgctatttcaccatttgaagaaccttcaaaaaggtctttagagacagggcatggtggctcacacctgtaatcccagcactttggaaggccaaggcaggcatatcacttgaggccaggagtatgagaccagcctggccaacatggtgaaaccctgtctgtactaaaaatgcaaaaattagccgggtgtggtgatgtacacctgtagtcccagctactcagtggccgaggcacaagaattgctcgaacctgagaggtggaggttgcagtaagctgagatcgtgccagtgacactacattccaacctaggtgacacagcgagactccctctaaaaaaaaaattccttagaaacttcagaaggatccttccactagggcagaagggatgagagagtaagaatcttcacccctaccactcatgcctttctgaaggctcagtctggccacactgcaagggcacagtgagccagttttggcctggggcttcttgctgctgccaaattaacaactccagcccttgggtttagccacctgctgctgctaaaaatgttgctgagagtgatggagaggtgttttagttcccattttacagatcagaaaatcaaggcccagagaaactaagtagtcttggagataggagccatggcctctccacttgagttatcatcttgaaacatcaaggacaagccaactttatcaacagttttaggcctgtgagaaatgggcttggtttatcttgaagattgtaaacaaataaaaaaatagactgctccattactgatgagaaatatgagtcattctgccaggaattgaaagtacagctgcccataaaaaagctatgccggggtccagcctctccaggtccttgtgtgtgaaaaaccactcagtcaaagttccccttttatttctctttgtgctcagtaggatgctgaaatttctggaaaagacaatggaaatcaggggcaggaagagaacagtgtggggtgctaaacagatctcagcaacctccctgcccacggccatctctgcgcagacacctcgaccccccatgcgcaggtggagcagcgtttcctagttctttccagaggcttccttctgcctgccttccagccacatcgcctgagattgacaacgccctacagcaagacggaaacctccctttacagcaccaccttgcgattctgcagccacaaagttgagacttctgaacgtggcactcttctgttcccttactgtttcacgtgtacctgtgtcatctttcttgtttcatcgtaaacatacttctaaaattcccattttctttatttagaaatagaactacaagcggatggttaaacaatttaaacaaatggtccatggggaaaagtgaatttcacactgtcccccaaactttcagtg

SEQ ID NO: 29 - DNA, 21780 bp, Homo sapiens
acatctcccggcggcgggccgcggaagcagtgcagacgcggctcctagcggatgggtgctattgtgaggcggttgtagaaggtatgaggaggctgtgcggtgactgccgccctcgctccgggccgtcagccctgcccccgctccctgcgttctcccaggccctgcgcccgcccgggtacctgcccggtctggaaggcggagtgtttgttttgccacctcgcccgggcgggggcgagcagtgaagcccgcggagcgagagacttggcccggaggcgggagcctgggccggggccggggaagccaggcagcgggttaaggcttttgatttagggagagggacctgggggtaacctaaggaaaggcctcaggtcatcggaggggagacctggcccgggggcgggaggctgggctgggaccggggaggccgggcagcgcgaggccgggccggggaggccaggcagcgggaggcctggccaggggaaccgagcccggggccgggaggtcgggcacggggcaccgagctccgagggcgggagacctggcggccggccgagtgccggaaggccgggtcaggcggcggaaggcagcggcaagctgggaaacggacggcgctaccgccggcggaggagtggccccgggaagcggtgctgcgagggctggggcggccgggtgctgactgtgagatactcgccctgggggctgatccttccaattttggacgaggcttccgtctctgctgccttccatgcctggggcctggattatcccgggttgacaatgtggtttagctcttccagagagatagttgcagggtttaaactccaattccttttcggccctgcagagtttcgtgagtgctcgcagctcatacctgtggctgtgtatccgtggccacagctggttggcgtcgccttgaaatcccaggccgtgaggagttagcgagccctgctcacactcggcgctctggttttcggtgggtgtgccctgcacctgcctcttcccccattctcagtaagtggcacccaagcaggaaaccggaaaacatcgttcgcagccccctctcgcccacccacttcttttcctgcttagtcgccaagccttgtcgaccttgtaaatgtctgccagatctgtccgcgtctctctatctctgatttcagccgtctgaccacagcagcctcttccctggtctctccacttccagacccgcctgctcctttgcagtccactttttacagcacaggcagagggatctttatgaaatgaaagtctagaaagctcgtcctttgcccttaggttaaacccagcacttaatatggctaacaaacccctgcgtgtgttgggtcctgagtgcccccacccctccttatctttagcaccggttcgatttctgcacggcaatgctgaccttcatacctagtgtctgcctgcaacacctctgcactccctttctcccgccatcacatttgattagaagagctgctacttaaatttctgttttcattaaacagtttaaggttaaatcttcctatgctgtgttctttctgcagccagcattccctaagagagatgtgtcatatcctttgcagttgcttgtttactatcttccctgctagatttgcaagcaaactccaggagggacggacttggtttatcttggtatccttagtgtcttgccccaaatgcggggcctggcataacacagtgaatgcccatccattgtatttttacttttatgccctatctagaaaaagtagacctggtttaggattattcagcaaataataattagaaaagaaatggtagaggtgacatacggagtcactgaaacgatgtaaacctgcaagatagctgaaagagggccaggcaaggtggttagaccagactgtatcaaaatgggctcagccactgtgaatgtgcgtgctgtggttacataatctctaaaaatgaaatataaagcttaaatcatctctatcacagcccgatgcttggactttggttttgctttgcctttttgcaaaagaaggtttttgaaagtgaaaattattttagtgaatggatgaacagtttattggagtatggcaataaaacctgttcaaagtaagagacattagacattgtacctagttaaatcagatttgcttttgctatcctgaataaaggccttgcctcttgccatttgaagagactggcatctgatataggcaattataatgcttctttactgttttgttttcaaacctcgtttaacacaatctcctactgcttcatccccctacaaagcagtctttattttgatgaatgatatattacattgcttctggtgcctactattagatctttaagctctgccccaaagataagaagcactggtgtttgggcctaaacaaagatgggagaattcttagatttatataatattctttctctgcatgttttgttcttaccttcacatgttgcctgtagagcttctttgcattacaataatgaaatcaagctacctgatatgtattggacacggtctggcatctgccttgttgagccacttttgaataccagtgagcatcggtataagccctgaatagagatagggtttgtctcttccactgcttgatacactcagggtctagtatagtactctgcacacagttggtgttcagtaaattgttatggtgcaaatatcaaatgaataaatgctactgaatctgagttttggcagtttcagtcttcctgacagcaggatttcttcaagcggttttaaacttgaatctgattctgcaaagtagtcatccttggtgggagtgctgaggctttaaagtcatctgtaatttttataaaaaggcatccgagatcctccattttacacttatatcatacaaatcatttagatctgtgaaggctttcccattttctccttttgtccttccaaaaacaccatcttaggacttcacctggcacagggaagacagatcgtttgcacatactaagtgcccttctttctaacttgtgtcataaactcagaggctttgaatagtggagagtgctctgtactgtcttcctggtcacgtggcccttgccagaggaaaggaaaggatggtttgtttgtatagtacaatggaacttatttcaatgtattctgtatttgattttacattcctgttctcatatttttaccttaattacataacaaatattaaaagattgacttcaccaggcccagttacaatcgccagtttgataattcttatacgtactcaaatgaattcagagaccagatgggaaaagattttgataaaacctctggtacatcacaactgaagtcttttcttgtccaaactattgtgaaacagatgttctttctgtttcatttgctaaatctggaaacgtgactgcttttgagactttgtcctctctgacaggtaataaatataatcctgatatttttcaagttgtttgacagaagtgtaatctccccagaagtcctgctggacaggcttcacttttcctttggaggaacacagagatacagggaatatgttttaatgacatatacctaacgctgaacatgaaaccagttattttacttttattattattatttttagaaacagccttgctgtgtcacccaagctcaagtgcagtggtgcgatcatagctcactgcagcctccaattcctatgctcaagtaatcctcttgcctcagcctcctgagtagctgggactacaggtgtgtgccaccatgccaggctacttgtttttactttgttatagagatggggtctctctgtgttgcccagactggtcttgaacacatgatctcaaccattcctcccaccttggcctcccaaagtgctgggattacaggcgcgagccactgtgtctggcctatttcactttagaagtaaattgaatgccacatgcgaagtttgttaaatttttttaaaaaaggaaagaaaacacaaaagtaaactacctagtcgcatcagaaatgccatagtcatttttgccattttttcattcattagaattcagtgcattatgttattttgttatctctgcagtaactttctatcatgttatttattttctttgtcttatttaaagcttctgagattatggatttttgtttccttccctgaagttaagtgttatcattcctatatagtactaagctgtctacagaatagtgggagtctgccctcttgagttgggaagatcctagtttgaatcttggctgtgcgactttaaagttcattaacttctcttagcctcagtcacctgaactctgcagtggggatccttatgcctcagagtgtcattgggaggactcacgaaaatacgcttgtactttgagttcagtacctagcctgtatgagccagcattaagagggacagtcatcacgcagcgctttgcacacagctctcacgccacatcctttggctactgttttggtaaatctttactagtaaatgtttcttaaaagcatttacattcatggacatgattcagaaactaacagttgttttttaggtctcactttgagatttaaaaacccttagggcagagaccagattttatttcttacctcagagtttccctgtaggacaggaaccagcaacagcctaatgagctgattaagaattttagagatttaaaatttaaattaggattgccagttttagagactggcacataaatgttttcatttaaggcagtgactgtttcctttaggatatgattttttatctttctaagatgagatcaccatcctcagaataatttgtaccccgctgggcactagctaatggaggtgatgtcatgctaagcagcacttcagtgagttttgcgggaaccaaagctctgctcccaggagtgtggatttggtgctttcatgtggaaaaagcggatgatgacaagtagagagcaaatgtgcgcatgtctgatgctgtaaggatttcctttaccatcatataaatttttaaagtatatcaaaataaactgataactgagaaaatatatgttgttcagatactaataatgaagttaatgaagtccactatagtatttgtccctgagaaatctttatcaaatattttaaatcctattgtaaaataatgtattttttctttcagttttagagactggcaatcctaatttaacatctccttttgaattccccaccacaggcacactttcacacattcactctttaataacaggttgtttcaaattgttaatactttatagcttaatatagaaatttcactttagaaattaatttttatttctctgccttaatgctatagatgttgtagtctgctttacttcagtattgtaatgagtagttggctaaccaccatgtaaatagggagaacattctagttttttacttgtgtaggaaaacacagcttgaaatgtctaagtatctattttagagtgaagtaaatttatactgacaatatttttttgtgtttgaagacctgactgttacagcgttggtggcaagtgttaagggatccaggaactagacaagtgattctgagacctgagttccaggtttctaagtaatatcagttggtctactgagaactttgccataaacatatgtgttcagaaatttcctttcttagcagcagcatcctgaattgaacagaattacacacacatcagcccagtaagaaacaattcatgttaagtccattgctatgccaggataaatcttttaaatcacaattatttttcctatttatattttgtcaaataagaatgttctaaaaaccaaaatttctgttttcttttttttttttttttttttttgagacggagtctcactctgtcgcccaggctggagtgcagtggcgcgatctcggctcacggcaagctccacctcccgggttcacgccattctcctgcctcagcctcctgagtagctgggactacaggcacccaccaccacgcctggctaattttttatatttttagtagagacggggtttcaccgtgttagccaggatggtcttgatctcccgaacttgtgatccgcccgcctcggcctcccaaagtgctgggattacaggcaaaatttctgttttcatttaaggcagtgactatttcccttaggatgtgatttttttatccttctaagatgagatcaccatcctcagaataatttgtaccctgctgggcactagctaatggaggtgatgtcatgctaagcagcacttcagtgagttttgcgggaaccaaagctctgctcccaggagtgtggatttggtgctttcatgtggaaaaagcggatgatgacaagtagagagcaaatgtgcgcatgtctgatgctgtaaggatttcatctaccatcatataaatttttagaagtatatcaaaataaactgataactgaggcaatgtatgttgttcagatactaataatgaagttaatgaagtccactatagtatttgtatagtatttgtatattacagtactctgaaaagctggtcactatttaaagtttccattaccagtcacaaggagagaataattttatcccacaattttattgctggcaaaagacacaagtttattaaaagtcagtatttcagtgtaagagttactagactgtttgcagaagtgttcaaaagagatctttaggtccttggttgtctgtggaagctgatcagcatttaggggttcctgagcacagactgtgaaccctgcatttggcacatgcattcagagagccaatttgaggcagactgggggctagaaaggatactgccaggagctccaggttcagcttccgaagttattaagtcttatttcccagtttttaaattagacttcattttttagagcagttttaggttcaaaccaaaattgagaagaacgtacagagacatcctgtatcccacctgccccccaacacgtgcgtagtctcccccattatcaacatcctgcaccagagtagtacattcttacaaaggaacctacactgacacgtcatcatcacccaaacgccatcgttcacaatcaagttcactcttggtgctgtttatcctatggttttggacaaatttacaaggacttgtatccaccattatattgtcacactgagtagtttcactgccttaaaaagtctccgtgcgggccgggcacggtggctcacgcctgtaatcccagcactttgggaggccaaggcgggcagatcacgaggttaggagttcgagaccagcctggccaacatggtgaaaccccgtctctactaaaaatacaaaaattagcctggcatggtggcatgcgcctgtaatcccagctactcaggaggctgaggcaggagaatcgcttgaaacctaaaggcggaggttgcagtgagccgagaccacgccactgcactccagcctgagcaaggagcgaaattccatctcaaaacaaaaaaaaaaaaaaaaaaaaattctctgtgctgtctccctccctcctagccactggcaaccactgatctttttactgtctccatagttttgccttttccagattgtcagatagttggaatcatgcggtatatatggccttttcaaactggcttctttcacttagtaataatgcatttaaagtgttcatggcttgctagctcatttctttttagtgctcagtaatattctgttctctggatataccacggtttatttattcattcaccgactgaaggacatcttagttgcttctagttttgacagttatgaataaaactgctataaacatctgtgtgcaggcttttgtgtgaacataagttttcaactcctttgggtaaataccaaagagtgcgtatttaccatatggctggatcatatggtaagagtatgtttagttttgtaggaaactgccaaactgtctttcgagttggctgtaccattttgcatttccacgagcagtgattgagaatccctgttgctccacatcctcaccagcatttggtgttgatggtgttctggttttggccattctgctaggtatgtaatgatacctcattgttgctttaattagcatttcccattatttgcagtctgtgtatctttgatgaggcccactggattttcactttagattttctatagattggccataaagtcttgaaacaaagatattttctcatggattataatgcaatatcagtaaactattatgtgttcacctacgtttccagacttgttagctaccctgtactgttctctcagttaatcaagttaaccacaatttgtttctcaaccacaggtggctaatgattttgtatgtggtctgtccgctttgaattgatgtgcatggggcaagttggtctctatgatattcatggttcaaggaagttcgagatttcctggtacctaatacatgtttattgtacatatgaaagaaaaaagggcagatagaggggaacatggtactgagcatgatagaggcaaggaagggtggctactttgataggagaatacccctatttttgtcactcttgaaacagggccaagagttgaaattggctagaacaatcctgacctttgttgatattattttatagaataatatttgttactgttttctcacttttaaaaaatgcagatgttatagaaaaattagaagatatagaggaatgttaaggagtaaataaggtgtcagtaatgccatcacccagacagccactgttaataaatatgttaatatgtgaagacatactaatatgtaatatgtactgagtgactaatggcaggtcacttagtagctgtctcgattatcagatcaactgtcatggtatggcagtgtttatgttcaggtacccgtattagttattgttgttaatccctttctgcgcccaagttataaactaaactttttcataggtatgtacgtataggaaaaaatatgctgcatataggctcagtactgtatttggtttcaagcatctactgggggacttgggaggtaccccctgcccctgccccacaggtatactactgtataattattcttctatctaaagtaagatctaatggaagataggaactttgtcttgtcttccactctgtcctatttcccaggatgatacctggcacaaagtatttgtttactgacaaactaaaagatgatttatcccaattatactcacatcttcccttgattttccagaaagcctacaggaagtaagatggtagaaaagcaaagtcttcgtagaaatgcagagcatagactggctcttggagaaggtcaaacatcaccctctcctgtggttaaattgagatggtggcactggctgtcttctatattattgctgcacctttcctcaccaggggtgcacacaaaactgggagagaggggaggaaggagcttagctttgtcttaatagaagggaagaaatgatgttttccaagagaccttgaaattggggaccttggtaaaggtttcagtttgggaagataaaaaagtcctgggatggattccaacagtgtaactgtactcaatgccactgagctgtacgcttaagagtggtaaattttatgtctatttcaccacagttttaaagattaaaatttttaaaagtgggggaagttacctaggactttctagaaggacttttgagggtgagcaagttctgttataggcttgtgtattattttggtatttctgattttatcataggagtgaggttaaagttgtattttgactggaatttttgacattgtcagggtttctagagtgtggagaaggtcactcagtattttttgtttttgttttttgttttgcctttgttcttgttttcctctatttagggaggtggattgccatgggaagtacctttgcttcgaaaagccagaaaatgcctggtagaactccagaaaagtagtaaggagctggcttcttcagaggcagcatagcagagtgggaagagggccctgtcacttagattgtgactgtcgacaaagtcacttaaccaccagaagttgggttttctgacgtttagaattttgaaaagattaaaactgagtgccttgcaaagtacctggtatatattaagtgctcaataagtgatagttgctttgattctaagaactggttcaccttgtgagatataattgtgtaatggaagaatgaaagcagaaactttagtttctacttttacatttcctgggccattttactaccctaaatgagaagctgggcttccaaaacccactttaaaagtaaagactaggccgggtgcggtggctcttgcctgtaatcccagcactttaggaggcctaggtgggcagatcacttgaactcaggagtttgagaccagcctgggcaatacagcgagaccgtatgtctacaaaaaatacaaaaattagccagacatggtggtgcatgcctgtaatcccagctactcgggaggctgaggcgggagaatttgagtccaggagatcgaagctgcagtgagccgtgattgcgccgctgccctccagcctgggtgacagagtgagaccctgcctcaaaagaaaaaaaaaaaaagaataaagattaatggagatttggaacatcttgatactgtatcttgggaatctaagcattgtagaattgtgttatgtgagttataccattgtggtgggaagtttttgatttttgttttaactgtgttgagttgcagttcttagaaatgacccgaggtgttgtcttacaaaagaaataaactgtaatctgtatcttgatctgatgagggtatgtaaatataaaaaatcgagctgtatactttctatatgctttatgtagttcactatatataattcatagctcaattaaaaagagagagagaggctaaattgtatgtaccattgcaaagaaatcattatccccagaactgactcacatacacctttaacagtagagggagaactgaggtattaatttggaaaaataatcactgggataattaatataatgcagtggttttatgactgattttttattaacttctattttctttgtattctagttaataaaggtatccatggagaacactgaaaactcagtggattcaaaatccattaaaaatttggaaccgtgagtatttaaattgaattctttataatcagagaaagatggggatgtgtaataagcaaacctcgagcagtggggcaagaggaaagagagtggtctctctctcaggccagagagaccaagtgacttcctacctcagacagctgtgtggctttgcataaactgacttttcttctctgaacctcgtctttaacatggggctaaaactttcacagaactgaagggaagatgaaaggaaaggcctagtagggtgtgtgacccatagttggaaacctagtcctggaaccaaaaggacaccacaggagaggcaggactcccaagcgccggtgctttctaccctcccgaatcgctctataggattagagggtttaggtttgggaggagtttcttgacctcttgtttatgagtttttacgactaaaatgcaatgccagttttcagtccggggacaaactgcctagttatggatgaattttaccctttttttccccgtgtctttttggaatattctgcttattaatgcttccaataactagcagatggaaaaaggaaaaagataaaactcaaattcactttttaattcttgtctgttattatttatttgggatctctcgtaatactttaaattctgaaagtttatttctgaaacccagtattgttattctcggctgccctgaatattacaaactaattttattactaaacaatatgattacagaaatactattaacaagttaccactaaagatttcacaattttgtttagcaaagggatttttctagaaagtaaacttttaaaatgcagtcccattttagagagttgttgctgtcatttaaatcattttagccagtgcagtggcttgctcctgtaatcccagctacgtgggagctgtggcaggaggatcacttgaggtggagagtttgaaaccagcctgggcaacataacgagaccctgtctctacaaaaaaacaaaaaacaattagtccaccatagtgtgtgtgcttgtagtcagtcctagctacacgccagaggttacagtgaagtaagaccccatctcttcaaaaaaatcctttgaaagtgatttacacattttcctactattttttttttctttcttttttgagacaggctggagtgcagtgatctgattatggctcactgcactcctgggctccagtaatcctcctgagtagctaggactacagacatgtgccaccatgcctggttatttttgttttttatttttgtagagatgggggtcttgctgtgttgcccaggctggtctccaatgcctggcctcaagggatcctcctgcctcggcctcccaaagtgctgggagtacaggtgtgaaccaccctgcctggccctaccttttcatgtcatgcagaacaccacttcaataacaagttgcacggaagccccagacaggtttagggttgtttcgatcctttggtaagttgccctcacagtcccggctttcacagcctctgccttttattaggagtatcccctcgtggactagctatcatatgcttgtaaagtacctacctccttaggaggcacccagagcacgtggggaaggggtgtcgggagctgggagtcataagtcccatgatccatcatctgtaggactcaaaggtcaagtcacgctttcaggatttaacttcagtctgtaaatgtgaggctgttcacctctggttaaaaatcataactgttttctcacgttgactcctttaatttactacatttaatctttttccaacagtatttttggaattgtgtataatgtgagatgctcttaaggttaagtgcatgagtatatggactgtaggtgttagtgtttggtagttcctagacctgtttttgcctgactcttggtctagatcagggatcaagcttaaggcctgtttttatcaactttcgttggaatataggcacatccattcgcttacatattgtcctaagcccgtttcaccagtataattgagcagctatggctgggcacagtggctcacaactgtaatcccagcacttttggaggccaaggcaggaggatcacttgaggccaggagttcaagactagcctgggcaacatagcgagatcctgtctctaaaaaagaaaatacagaaattagctgggcatggtggggcatgcctgtctgtagtcctagctactcagaaggctgaggaaggagtatcactggagcccaagagttcaaagttgcagtgagctatgatggcaccactgcactccagcttgggtgacagagccagaccatgtctcaaaaaaaaaaaaaaaagaatagaattgagtagctgtaacagaaaccagatggcccacaagcctaaaacacttaatatttagcccattaaaaaaaaagtttactgaccccaatctagatagcagaggtttttttagataagtgacttccagacagatattttcaattatttacaataatgcttttatatattaataaattactaatttgtttagctcatggggtttaaggaataatttatgaattgtgataaatattgtgctttgagttatatttgcattttgttgatttcccatcatttcagggtaatttttaagatttttactcttacctcaaaggataaaatatttcacaaagttaataagtaatttttaaattataaaggtatttgatgaaattttgaagaatttagaggaaaatgtaaaacatggaagttaaaagcctgaactctgaagtccaacagatgctttccttccttcttggctgtgacacaatatttgcataacctttagcacattacttagcctcacgtcaggtcattttctcatctgtataactgttgatgtgaaattgaaatgaagacagcctggtttataacattcaacaagtgttaactgttactgtgagttataaaaattgcactaatataaacagaaggcgtggtcatttctacctttgtaaagctattatttgatttctaaacagaaagatcatacatggaagcgaatcaatggactctggaatatccctggacaacagttataaaatggattatcctgagatgggtttatgtataataattaataataagaattttcataaaagcactggtatgtgtcttacataatttttaatccttttcaaatgtttgtgccatttacatttgatataatattaaaagcagtattattgaggtattagacagtaaaccgtgacacagactagctgtgaagtagagattgggcaggacctacaggtcctctgatacactgtgaacgcgtcactcttctgcccaacttcatagcctcctcttgctggcctcctatctgtatgcttggttgcctctgccctgacttctctgtagcccttgcttctttttcttctttctgcttcctctttgatcccaatggaaggttctcaaaaaaacagttaagtggtagtatttattttttccccagaaactgcaagagatatcacaagcattgccttatttaatttatgacaacctggaaagtaacgatgagattctgaaaggttaaagacctcgcgcagtcacacagtatggcggcagagctaggtctgtgtggctccaaagcccaagctctgaatccatcttctgttctgcttcacttccttgtatcctcatgtgctctgttgcctgtcttcccttaccctacgaagctccccatcttagagagacctttcttttactctgttccttttgattcctttgatattttgtctccttcccttcttccttaaattttgaatacatgtagtttaagcttgtactcttcatttgtttccattccttcttgagtctttttccattttctgtctctactactaaaactgcttgctttaaatttaccatggccttgccaccagatccccctctcgatttctgtactatgtacaacttgaatgtagtactacatttgagaatgtttttttagaaatatagataataaaatccttcacagtgccaaaaaagctaattaatatttggtgtattgttattttttcttggcagttctttttaaagcttgattttattcataacgtataagcaatgttgtcttctgcttgtttcacttaaaggaatagcatttttcatattgctgcataattttcatatctgttataatgattatataatactgcatccccaaaactaccattcacttaatttgaataatttactgtatgaatgaacattatggctgtttcccttttaaattgatgctatgataattctttgaattggcctattaatcatattagagttaatttttaattagagaagctgtagtagatctaaggtgggccagtacctatcagagtggtggtggaaatggaaggaagccagattacactgggaagatagcagggtttgtgtcagattaattataaggagtgagaagagaatagttgaaaatggagctctaaatggcatcagttttattgcttttggctataagttgagatgccaccttcaaccattaacttaaaaacacaacaccttgtttacttttgctttacgcatatttgaaaatttacttctagatattctgcctcacatttctagttaggatacctccttcctatagaattttgcactgttggctctattgtttcaaaaaccaaaaacaagcatattattccactaccaccagcacctccccccacatatttagaccagcagtctgggttttgcccagtgagctcctttcctactttgcaatgtaaaggtcaggttctcatgagatctctggcaggctggtgttgggccaggcgccatggctcacacatgtaatcccaacactttgggaggccaaggcaggaggatccttgagcaccaaagttcaagatcagtctgggcaacacagggaaatcccatctctacaaaacagaaaaaaggtagcagggtgtggtggtgcgcacctgtagtcccagctactcgggaggctgaggtgggaagatagcttgaatctgggaggttgaggctgcagtgagctgtggttgctgtactctagcctgggccacagagcaagatcctgtctaaaaaataaaaataaataaaaattaaaaggcagccaacacatcagcaccagaagccagtgaccttgtcacacagctgagataatcaacaacattttggagatacatgtagactttctgtatttaatcttcatacccatcaaatttactcaattctgagggatgtttcccaccaagatttagcattttgaaatctgagtgcatcatgcagtcaatctgtacgttaatgtggaaggttctctaaaggagtggtagaaagcccaggagccctggatacaggcccagcatagctttgtcactttggactggtttgttaactctgctacatgtcccacatctgcacaagtgaaactagtaataatatgactctcatggtgattggaaggattagagattagccatagcagaatacctgatgaacagtaataatgtttgggggttttccttgaaggcactataaatgttgtaatgctatcttaaaattgttgggaagttagagtcagagaaacgcatttcctctgagtgtgacagatgtgtgtatgtattataggatcgtattgttttctagtcttatttttttaaactgatgattttcccatggcaacattttatctgtgaaaatgacaacatagtatatcccattatataagttagtatagcttgtctaaccaaacccttattgttagacatttgtgtttttcactacctaaaccgctgtgaaagacatcattttggctataacactgatgagcttatattatgaagtatcttataagctacaaaattgaagaaattttgttcaccatgttcaaaatagttagaattctcttaccatttaaaaggaagaatttattgtggacttctgaattgctgagtagttaatttcatttcaaagtagttattctttgttttccatacaattaaaagtaattctttctgttccaaggaatgacatctcggtctggtacagatgtcgatgcagcaaacctcagggaaacattcagaaacttgaaatatgaagtcaggaataaaaatgatcttacacgtgaagaaattgtggaattgatgcgtgatggtaagaagaaacaattagaatgaacttcattgtacaattaattttatactatggtctagcaataattatatgtataataaaatatgagaattgtggaattatactgtacataaccctaatcttacatactttagtaagaagtttaaaaaaagttatttatgccaacttcctaaaatggtttgagatgtgttgccgtgccccaggttaggttaagatgacctcttagttttagtctcagtttcttcatcatgttcccatacagtatatctgaagttgttgaataaagtcatggattttttttccttttatttgcaaatgtctttacagtttctaaagaagatcacagcaaaaggagcagttttgtttgtgtgcttctgagccatggtgaagaaggaataatttttggaacaaatggacctgttgacctgaaaaaaataacaaactttttcagaggggatcgttgtagaagtctaactggaaaacccaaacttttcattattcaggtaatgtctaactgagtgatttggttattgacgattaagcaggggttactattctcaactgtaaattatccaaaggataatttttttcctgaagctaatgaactattgttacttttcatttatttaccacttaaaagatatagagtaaattttaattttatacttatatcaaaaagactcagcataattaacatccttttttttttttttttttttttttttagacagagtcttgctctgtcgcccaggctggagtacagtggcgcgatctccgctcactgcaagctctgcctcctgggttcacgccattctcctgcctcagcctcctgagtagctgggactacaggcgcctgccaccaggcccagctaatttttaaatttttttttaatagagacagggtttcaccatgttagccaggatggtctcgatctcctgacctcaagtcatccgcccgccttggcctcccaaattgctgggattaaaggcgtgagccaccgcgcccggccaattaacatccatttttacatagcatttcaattttttagaactaagttatgtgttcacacacaaatttttataaataaatatttattttctaacacccaggcctgccgtggtacagaactggactgtggcattgagacagacagtggtgttgatgatgacatggcgtgtcataaaataccagtggaggccgacttcttgtatgcatactccacagcacctggtgagaacgttacacataatgaatgttacatgtggattttaaatgaattaactgtgactgatcatagaattatacaatgaaaagtgtgtttcagagactgtcaagattttgatatccctaaagatatcaaaacttgtctatattttagggaaccttcatcaaagagaagtctcaaaaagttgtctttagccaaaagtttggctagaaaatatgcatatatagccaggcacagtgactcacgcctgtaatcctagcgctttgggaggccgaggcaggtggatcacttgaggtcaggagttcaaaaccagcctggccaacctcatctctactaaaaatacagaaaaattagctgggcatggtggcacacgcctgtaatcccagctactggggaggctgaggcaggagaatcgcttgaacctgggaagcaaaggttgcagtgagccaagatcgcaccactgcacttcagcctgggcgacagagtgagactccgtctcaaaggaaaaaaagaaaagaaaatatgcatatgtagagtagactagcacgatgtcattcattggactttatcaggtagatctccgctactaatatcaggtagaatattacgtggcaacagaggccaagtcagagcttcccctgcatcttagagaagaagagaggtacgtttctcaggagttatttgaaaggtagtaaataaaaaagataaacatgactagtatacaagaggatagatgtggagtgggagaaaagaaggtaaaaaacgatacatgaatgtgccgttaacctccacgtttttactgttctgctgcacacgtcatcatctaaataaacatttgtggattataccaccatttactcacacagctaagggtgtcggagagtttggaaactttaggtaaatgtattcttaagcagtgttgcattttaaaatatgctcaatatggtttatcttatcctctaggcatctttccaagcaaagtacctctaagttaaaagcaatgggtctaatagttaacctagaaaaaaaagtatgataaatatactattttccctttttggaccaatacttggtagtgtgtttattatactttattcagatgctctgtagacaagtaggacactcaaagcaatttgtttcttggctaagtcagtattaaaataaggtgaaatctgattggaacactgtgctacttacaatgatcctttttatacatctttacttttgcatcttaccttctgcgtgtttgctcttcttgcctattgaaaggggagtccagaaagtaaaactttcaataattcagtgttcgtgaagctggtccccggccagctttgctgaaagcagggggtgtacgcatagcacacattcgtccttcagcatcatttcttctgaaaccaaaggtgtctttttttttttatttgtatgactaataagacttatgtaagtttatgcttatttttgcctttatgactacataataatttatagaatcaactaaaatcagctatccatggtattttgcttgtattttgccttttaggttattattcttggcgaaattcaaaggatggctcctggttcatccagtcgctttgtgccatgctgaaacagtatgccgacaagcttgaatttatgcacattcttacccgggttaaccgaaaggtggcaacagaatttgagtccttttcctttgacgctacttttcatgcaaagaaacagattccatgtattgtttccatgctcacaaaagaactctatttttatcactaaagaaatggttggttggtggttttttttagtttgtatgccaagtgagaagatggtatatttggtactgtatttccctctcattttgacctactctcatgctgcagagggtactttaagacatactccttccatcaaatagaaccactatgaagctacctcaaacttccagtcaggtagttgcaattgaattaaattaggaataaataaaaatggatactggtgcagtcattatgagaggcaatgattgttaatttacagctttcatgattagcaagttacagtgatgctgtgctatgaattttcaagtaattgtgaaaaagttaaacattgaagtaatgaatttttatgatattccccccacttaagactgtgtattctagttttgtcaaactgtagaaatgatgatgtggaagaacttaggcatctgtgggcatggtcaaaggctcaaacctttattttagaattgatatacacggatgacttaactgcatttttagaccatttatctgggattatggttttgtgatgtttgtcctgaacacttttgttgtaaaaaaataataataatgtttaatattgagaaagaaactaatattttatgtgagagaaagtgtgagcaaactaacttgacttttaaggctaaaacttaacattcatagaggggtggagttttaactgtaaggtgctacaatgcccctggatctaccagcataaatatcttctgatttgtccctatgcatatcagttgagcttcatataccagcaatatatctgaagagctattatataaaaaccccaaactgttgattattagccaggtaatgtgaataaattctataggaacatatgaaaatacaacttaaataataaacagtggaatataaggaaagcaataaatgaatgggctgagctgcctgtaacttgagagtagatggtttgagcctgagcagagacatgactcagcctgttccatgaaggcagagccatggaccacgcaggaagggcctacagcccatttctccatacgcactggtatgtgtggatgatgctgccagggcgccatcgccaagtaagaaagtgaagcaaatcagaaacttgtgaagtggaaatgttctaaaggtggtgaggcaataaaaatcatagtactctttgtagcaaaattcttaagtatgttattttctgttgaagtttacaatcaaaggaaaatagtaatgttttatactgtttactgaaagaaaaagacctatgagcacataggactctagacggcatccagccggaggccagagctgagccctcagcccgggaggcaggctccaggcctcagcaggtgcggagccgtcactgcaccaagtctcactggctgtcagtatgacatttcacgggagatttcttgttgctcaaaaaatgagctcgcatttgtcaatgacagtttcttttttcttactagacctgtaacttttgtaaatacacatagcatgtaatggtatcttaaagtgtgtttctatgtgacaattttgtacaaatttgttattttccatttttatttcaaaatatacattcaaacttaaaatta

SEQ ID NO: 30 - DNA, 14845 bp, Homo sapiens
ccgagggcggggccgggcccgggagcctgtggcttcaggaagaggagggcaaggtgtctggctgcgcgtttggctgcaatgagctcggcctcggggctccgcagggggcacccggcaggtaggcagggggcgtcgactgggcaccgagcaggtctgcgtcttgctccggctggaggggaaacgagggttagtggaccgggcgcgcggaccggagtggggccgcgggttccttcggctttgcagggcggcctggagaagttgcactcttggattgaagcgctcagggcgggtggggacggtttcgcgcttcagtctaagaaacactcggggacctggctgccgcctcctggcggtcccgagtagcgacgccggcgccggggcgtgcccctgccgcctttgtcctccggggcgatgagcgctttcggggcgccccggctgtttaaaccttaaaaggctgtccccacgcgggcctggcgttcccccacacctggccgtttgaaatgttgggggttggatcttttgtttgctcacttcgaaaagtgaaaaggaggggttgttccgccgagtcataatgaaaacataacaggcccgcggggtgcccgggccaagaccctgggtcctcccgggcttcagctggaggcggccagttcctggcggccagcacaccccggtatctctcttcttcatccaggaaacctgctgctgtctgtcggtttgagccaaaaccacaataacttttttctgcaaagtaatcaactgctaagagcgtacgttctgtcacttattactggtaaagtttagaaacttcaagcctggccagagtgaaacaaacaaaaaggtcgaaacgcctgcagttggccggccgtggtggctcacgccttgtaatcccaacactttgggaggccgaggcgggcggatcaccagaggtcgggagttctcgaccagcctaactaacacggtgaaaccccgtctctactaaaaatacaaaaaaattagccaggcctgggcgcaagctactggggaggctgagacaagagaatcgtttgaaccctggaggtggaggttgcagtgagccgagatcgccccactgcactccaacctcggcgacagagtgagacttcgaatcaagaagaaaaaaaaaaaaaaagaacgaaacgcctgcagttggttagagtgcctttgtttaagaactctttatattttgctgcacaaaggaaatggtgctccagaggcaagctgtaaaagtcacatggtcgtagaggaggtagataggtagccttgtcctggaggcacagtgcagggtccagttgcagtctctaggggcgggaagccggggctttccttcactcacctgctcccttcctcttcttcctccaccgcactccccagtgcatgttctaggcctgatggaggttactctacatagggttactaaatacattgttgatggagccgatgggtagattttcatagagagtgcagtgaatgaagacgatgacagtagaatgaccgaagtcgtttgggaagttgaacaaagtttagaaaggtagccggtctcgggtgggaggggctgcgtggggatgggcctacagagactttggaatctgtaggtgggctggctttcaatcccagcttcactttgccgaccttggcacgcctggcccactttctctgtccctgttcctgagctgtggagctgtgagataaggtatctaaggcatcaggccatcaacaaatggtagctggcaggattatctggagggactatcaaattagagtgaggtgaaaaaaggaatgattagttttgtaaaacctaagctgatttaaggaataaggaggtggcagttacattatcctgcaaaggaagagaagtgaaaagagggccagacacagtggtgggcgcctctagtcccagctactggggagactgaggcaggagaatcgcttgaaacctggaggtggacttgcagtgagccaagattgcgccactgcactgcagcctgggcgacagagggaggctctgtctcaaaaaaaaaaagtgaaaagaggtcaagaatcaggtttaaagaagggcacatttttgataagtagattgcagatgaaaaggaatttctatatctgttatacagggtagctccttcattaaaatttattttctccatatcaataaagctatttcttactttatccaggtttttaaatattaacgcaggccgggcgtggtggctcatgcttgtaatcccagcacttccaggaggctgaggcaggtggatcacttgaggccaggagttcaagaccagccaggacaacatagcaaaaccctgtctctactgaaaatacaaaaaaaaagtagctgggtgtggtggcgcatgcctgtaatcccagctactcaggaggctgaggcgggagaatcgcttgaacccggaggcggaggttgtggtgagccgagaccacgccactgcactccagcctaggcaacagagcaagactccatcccaaaaagatagtaataaaaaataaatattaatgcggcataatgatacttaagtgcccccttctggaaagcttgtcttcttgggatacacagctcaaggtggtcatgatgtgttattttctctcaatctgtgggtaaagtttatcaactccagaaaagtattggaacttaggtcctggcatctgtctccatagctttttgttctgattcagtgtttgctagagtggccactggacctggtcattaactggtactgcaggatgcagggtgcactttgtgagagtgaaggtaagttacagctggccagcatcagaattgggatgtccagagcctaggtttttttctacatccgtagcattaacaaacaacaacaacaacaaaaaacttaaaaaaaaaatccctcactgaggttgccaaatctgttaactttgaaactgaatgtattaagagatggggtctagctctgttacccaggctggagtatggtgactattcacaggggcagtcatagcacactatgtcctagaactcttgggctcaagagatcctcctgccttggccttccaggtaaccgggactataggcttgccactatgcccggccagaacgtcattttaaacagattttcttgagcagctacttaatactagttagccattcctaaacctgtaggtcttgactaatgtgagggcatatttgagacaacccaaactcacatcttaagttattaattttaatgtgtcagctaacaactgggaagctacttctttggcaatatgagaaacaagagttttaaagacccaagcaagaatacatctccagtgttttcaccctgagggatatgagttagtttgctgagcagccatttggcacagcttccatgagttaggttgtgagccgccttcggctcagcagtcagtatggagcagaagccacaggaggtgagccgctggcctgctgccaccgaggaggacactgagacatgagtgctttccaagttgtgcagaattttggcatgtgaggaggatggttgtgacatatggatttaattttcttgaagttattgtttctttatactctaattggttaaaagataagcaggtgaggttatcaaaaggcagtagattccgacagcttttgaaaatgggaagagtgaaatccctgtgctgtcttcatagagcagtgtgtggagtaggaagtacctcgttactgtgctcacctagggcaaaggtcggattaaacagctttctcatctgccatgcagcggggaggaccagttggagaggttgcttttggctctcacaccttagtgtaaaaatcactttgtgaaaaatgcagctgtcacctccttcctccaagattctgattctgcctcagttaggatccaggaatctgcattttaacatgcacaccaggaattctgatgcccaaggttgagcaaaactgacttagggcgtacagacagaggatgccttagtgtggggtcttagttgggtctcattgcttggggcagttccaggaggaataggctaaaagggacttgaactgaattccccaccttgtattttttttgaggagaagtgaggttagatcaatcaggtgatgggggctagtaatggggagatctctaaggagaggggaaccaacccttttggctaggagatgatgggtaagagtccatgctttagggtcattcttcctcaactgaagggtgcatcttgctatactgctaatatttcagtttattcattgctgtctcccctctaagctgttgagctatcaggtaaaaacagatgcatgagtggatggggcctttattgtagaagatgccacactttgcactgtccagtgtagaagccactggccaattcatttaaattgacaataaaatcgagttcctcagttgcattagctgcatttaaatgctcagtagacacatgtggccagtggctaccttatgagacagtgcaaatacggaacaattccaccatcacagacacttccatgacatagcactgctctagagagtagagaggaattcagtggaaggctgtccagggagtagggagtccagttgagaatggagagcagagggctccccttacagggttggaaatgcagatgtgtcatgcaggagatccaaggtccaagtctttgcccttgcccttcccttcctccacccaaacttctacctcttccaggcttacaccactgctaatccagcattaaccacaaactatatttcagttttcctgtaggacttaattctttttcagaaaatgtgcaaaaacattttctgcataacaaagcaacttcatatttcaactccgtaatcacagaactgttactctaggcatattttgcagtgaatgcatttgtgtaatattttctccatttctgtttataagattgttattttgcaggtcaagttgggggtgagaaagcatagagctgttatagtttgtttattagtaagcagtttcccttcatttccttttcttcacatactttggcttttaaactaaccaaaacagaagggtcttaagagtttgggagtcagaagggggatgggagttcctactatattttactgccataagtaaaaaataattaacaaaaatcaactttttttaataggtggggaagaaaacatgacagaaacagatgccttctataaaaggtaaagctgtgctcttttctaataaaggtctcttcctttgatggtcatgatcagcctacagaaatcaaagcaagaatgggtcctgggagctaggaagtaaaactgagtaggccaagttttagcctttggggagctcatttgtagataggcaggttgtgctgcccctggttgtcgagggacccggagtgatgttcagaatgcatattaattggcatggcatgagcctagagctagaacttggttctgagcctcgtggttattcctggttgctggatcctgggggccaggggaaagacatcaaggcagagggttagggatgtgtcaggatggcacatggctgctctttaccaattggcagagagatatttcaggactttccttattagcatggcctttcctggagcacacccatggaacatcagcctggcaaggaggaagctcagatctctatctacatgttgacctagaacttggaggggctcattatttaatatgacttgaagtgattgtttttcaacttttcattaacagagaaatgtttgatccggcagaaaagtacaaaatggaccacaggaggagaggaattgctttaatcttcaatcatgagaggttcttttggcacttaacactgccagaaaggcggggcacctgcgcagatagagacaatcttacccgcaggtagtagttttatctacctatcaagatgaggcagttaagtgataaaattacttttggccaggtgtggtggttcatgctggtaatcccagcactttgggaagccaaggtgggaggatcacttaaggcaaggagtttgagacaagtctgggcaacagagtgagacctggtctctacaaaaaataaaaatcaattagctgggcatggtggcggtagtcccagctactctggaggctgaagggggaggattgcttgatcccaggagttcaaggctgcacggagctgtgatcatgccactgcactccaggctgggcaacagagtgagaccttgtctctaaaataaaaaataaaataatttttttccatgtttccaaatgaaaagttaaaaaaaattaaaaattaaaaaaattccagacttctagatgtagggaaaagttacttatcataacttgtcaacactaatgaggtaacaacagatcaagagtgttggagcatgggccttgctttgatgcagcctcccttaagaacttgcctgagttggccgggcatggtggctcactcctgtaatcccggcactttgggaggctgaggcgggtggatcataaggtcaggagattgagaccatcctggctaacatggtgaaaccctgtctctcctaaaaaatacaaaaaattagccgggcgtggtggtgggagcctgtagtcccagctactcgggaggctgaggcaggagaatggcatgaagccaggaggcggagcttgcagtgagccaagatcaagccactgcactccagcctgggcgacagagtgagcctctgtctcaaaaaaaaaaaaaaaaaaaaaacttgcctgagttattttccttactctgttctattaaatgttgacaggcttttgcatttgtactaacatttgcatagtagacaacaacactctaaattgaatcggctgtcattatgattaaatcctttccgaccatggtgaatgaagggaaaaccaccattgttatatttcatttcttttctcctaaagaaagcaaatttatgtgtcgttaaaatgtgtatagattcttccaaagtaagggtatttgacaactttgaaaagtttataggctaacatttcatttaatataccactaggttttcagatctaggatttgaagtgaaatgctttaatgatcttaaagcagaagaactactgctcaaaattcatgagggtaggtagttttgctatcatatagttcatcttcctctaatgaaaccgagtcctttatcctatctgtaaagacaggtacaagtaattacttgtgtgacaaaaaaagtattaatttagcacaggttacaggttttgggtatgctgctgtgtttccgttacccagcacatttagagacccttgcaaataattatgcctctaaagtttatatttagcataccactagttacagtctcttgtagaaatgaatgaaatgaccccttcaattggcagtaaaagcctaaaatgcaagtactacaggtgctgggcagtcaacaggctcattttctcattgactcctttcatgcctcattttctcactggtttccaaatagtgttggtttacatacattacctcctttaattctcacagcgtcaatagggggtaggtattctaattataacaacctatattataatcatcgctgcatgccaaccattatatttgcataattactttaaactttcttcagagctcttctttaaactgcacatcattctaactttggctgcttttaccagcttttctactttgctcagaagctttggaggacatcagtctcatggcaccgcacctggctttgagtactcttttggaagctctaagtgctataatcttttttttttttttttgagatggagtctcgctgtccgccccaggctggagtgcagtggtgtgatctcagctcactgcagcctccacctcctgggttcaagcaattctcctgcctcagcttcccaggtagctcgcccccatgcccagctaatttttgtatttttagtagagatggggtttcaccgtgttggccaggctggtcttgaacactggcctcaagtgatccacctgcctcggcctcccaaaatgctgggattccaggcgtgagccactgcgcctggccctaagtgctgtattcctatagtgaaagtgcagcaatgcgtggggagctgttgagcagcagtttctgggtctttccactctgctctaaggtctctgctgattcaaggaaatttttagtttattgccaaaataacttggatcttaagtgagattccctatcgtaatccctttatgttttccacatcattctgtgttttagaaaggctaatgaaatttggtcaaactctattactctgaactttaataaatttggatttttttaaaaaaataagatacagtacggtatattgtttgattaaagactaagttgtttcatcacagatattttacacttattaaagagtaggccgggcatggtggctcatgcctgtaatcccagcactttgggaggctgaggcgaggtggatcacctgaggtcaggagttcgagactagcctggctacatggcaaaaccccgtctctactaaaaatacaaaaattagctggatatggtttcaaatctgtaatcccagctacttgggaggctgaggcaggagaatcgcttgaacccgggaggtggaggttgcagtgagccaagatcgcgccactgcactccagccctgggcaccaagagtgaaactctgtctcaaaaaaacaaaaaagacaaaaccacaaattttcctcctccccaatcatgtggatgtaactttattcttgtgttaataaactgaatttttatgtgtagataacaagcatcatattttcatttctatattctcttttgggtcctttatagtgtcaactgttagccacgcagatgccgattgctttgtgtgtgtcttcctgagccatggcgaaggcaatcacatttatgcatatgatgctaaaatcgaaattcagacattaactggcttgttcaaaggagacaagtgtcacagcctggttggaaaacccaagatatttatcattcaggtaagactgagtacattatcatcttaattataaagtctgtcattctgaacatgtgataaaggtctaaaagccagttttgaaagtaactttctccagtaattggacaggccgtttttgaattctggccaatcatagttgcactttgagctgttagtaataattctttgacactctcattgtctatattacaaaataacagcatttggattgagatttgaagtgactcacaaagtaaccaatgtgctactccctgtccgagcctgataccaaggagagccattggaaagcgtacctgctgattgaagagtgccgcacaaggcaacctcatcagactaggtttgcttctttgggaggtggagagcatataaaccagtggaaagaatggaaaaataaagccttctagtcttatcctgtctcatccctttcacattgccccttaaaccaagattgtttccccgctgccaaattggttttagggataaaagtattttttacaggcgtgatggctcacacctgtaatcccagcactttgggaggccgaggcaggcagatcacctgaggagttcaagaccagcctggcaaacatggtgaaaccctgtctctactaaaaatacaaaaattagctgggcatggtggcaggtgcctgtaatcccagccattcgggaagctgaggcatgagaattgcttgaacctgggaggcagaggctgtagttagccgagagcataccactgcactccagcctgggcgtcagagcgagactctgtctaaaaaaaaaaaaaaatttttttttttgcatgaatattacttggcacatcattaacgattttttttttttttttgagatggagtctcgctctgtcccccaggctggagtgcaatggtgcaatctcggctcactgcaacctccgcccccaggttcaattattctcccacttcagcctcccgagtagctgggattacaggcacctgccatcatggctggctaatttttgtattttcatagagatggggtttcaccatgttggctagtgtggtcttgaactcctgacctcaggtgatctgcccgccttggcctcccagagtgttgggattacaggcgtgagccactgtgcccggccaaagattttgaactacaaaagagaaacctgacatgccagtgtcacaattctgtatttccatgaatagcatggaggacatgaaataacattatgttagtctattcttgcattgctataaagacctgagactgggtaatttataaggaagagagatttgattggcctacagttctgcaggctgtacaggaagcatggtgctggcatctgcttctggtgaggccttaggaagcttacaattatggtggaaggtgacagagagccagcatatgacttgttgggagtgggagcaagagagtgccaagggagaggtcccagactctcttaagtaaccagatttcatgtgaactgagtgggagctcacttacaccaagaggatgatgctaaaccattcatgagagaccctccccgatgatccagtcaccttccaccaggcttcacctcccacactgggaaccacattttaacatgagatttggaggggacagacgttcaaaccgtatcaaacatgaaactgcatttcgcatcctaccataaagccttgttttggggtgaggaagtggctgtaagtgaagaatgactgcctcgtttctggtttggacaactgcattggaatgtctgtgggacatggaattggtcatacaggtgtagaacctaagacaggtggcctcggctggagaaataaatcaggaggtggtcgtggaagccatgggattagatgagtttactcgtgttgaatacagcctgaaaaaggagcataaaacaaaaccgaggggcacccatgaggaatgggctgaagagggaagatactgaggaggatggacaccaggagagaaacaagaaacaaataatgacatgattgttttgtgaaaaggggagtggccaacactgtcaaacacaagagaattggaaataactaatgagctactgtgggaagaaagccacaaatgaaatcgttttccaagttactttctctctctatgccttagattcttggtaaaaagagcacctgcctcatggggtggttgtgtgggcaaaatcacctgactgatttaatgaatgcaaaccacttagaacagtgcctggcatacagcacgccctcagtaaaggctcgctcttactcttattgcagttgactgggcaggtgatgtcattaggttaaaggtgttctgttatatttaggaaggacagtagaaaaaaggcctgaaaataagcctgctgatacgaagattaaaatctgcctataaaaacgggatagtagggattttctatttattttatgatttgaaatcattcaggactttcttttgatgctcataattctttaaccatttcagaactgattgatgcatttataatgctacaacagaatcttattggctggctgtattcgtgtatagggtgaccataacaaagtaccacagactgtgtggtttaaacagcaggaatttatcgtcacagtcctggagctggaagtctcagatgaacgtgtggggaggattggtttcttctgaggcctccctttttggcttgtaggtggccatcttgtccctgtgccttcatatggtctttcttctgtgcatgtctgtgtcccaatttcttcttatgaagacactagtcatgttggatttggtttcacccgtatgacctcattttccttaatcacctctaaaggccctgtcttccaatacagtcagagttgaggtattggggctaggacttcaacatatgaatttttggggaacacaattcagcttgtaaaagtcacttatgagaagagtttaatgttagcctctgagtgagtcagaatttaatgttaattatgagtctaaatttaatgtaaattctgagtgagtcagaattagtgggtaaaaatttgagacctcactttttaatgggcacacaaggaagatggtgcattagtaggtatctcctcaggtcaggctggatgtcattttaactcctaacaatttatagcagcagccaggcaagcaaaagtcaatctggaaatacactgcctgcctaaacagaaacacttaggtcaatactatagctttcaaaagggaaggtaacaccgtgtgccctgggtgtggttaatctgtaagaaattttaaaaccacaagctttttcctctacagtatacccttctaccaacataatttgatgtatacttggggatgccaattttttcttaaaacattaactaaaagaaagcctaagtaaggaaacaactttgttggcttttgtgccctccaaacctgaatgtattgcttctgaactgctcagaatgtggtttctgttgtaatgaaggggtactggcttacacattcactgcacacattaagcactgggaaggaaacagtaggcaaagaggtgggtttttcctccttgtcttgtaggcatgtcggggaaaccagcacgatgtgccagtcattcctttggatgtagtagataatcagacagagaagttggacaccaacataactgaggtggatgcagcctccgtttacacgctgcctgctggagctgacttcctcatgtgttactctgttgcagaaggtgtgtggtgtttaaaacaaacatataattgcctctcttggctaaggtcctgtaagtttcacctttgattggtttgggtcagatctttcggttgggacatggtgattccatcctgaagctcacagacttagaatttctttgaccacatggcacagagtgataaatgaaagtgtaaagtaccttacagaaaaataattcctgagagttatgttgagtaaagcaacagtctaattaattatattagtattagcagcctaccatcagttactgagggtggtagtgccattgtggtaattgtcatggaaagctttaattttttttttttttgagacaaggtctcaactctgtcactgaggctgaagtgcaatggcatgatcatggctcactgcagcctcaatttctcaggctcaagcaatcctcccacctcagcccccctgtagctgggactataggcatgcaccaccatgcttggctaactttttaatttttcggtagagattgggtcttgctatgttgcccaggctggtctcaaacaatcctccagccttggcctcccaaagtgctgggagtacaggtatgagccattgcgtgcgtgcgtgcgttttttttttttatagtctcactctgttgcccagacgtgtgtgtgtgtgtgtatttttttttttttttaatagtctcactctgttgcccaggcgggagtgcagtggtccaatgtcagctcactgcaacctctgcctcctgggttcaagtgattctcctacctcagcctcccgagtagctgggaatacaggtgcctgccaccacgccaagctaatttttgtagttttagtagagatggggtttcaccatgttggccaggctggtctcgaactcctgacctcaagtgatctgcctgcctcagcctcccaaagtgctgggattataggcatgagccaccatgcccaactgaaaaatattttgataatggttctttgcttttgtagtaaataattttgacttctttttagtaatctcatgtctcaatcattgtctatcttgggaattttttaggaaatggaagaaattatacagaattaaccccgtgtatataaaactatatagaattaatctcttttcccatttgaaaagagtcaaaaaaatttaaaagccatttatatcatggacacatcttaagactcttctaaggatttttaagaacttatacttctgtaactaaaaagaatacacacagtaattgaaagccagaaaactgcagcaacattttccttctcacttttttaggatattattctcaccgggaaactgtgaacggctcatggtacattcaagatttgtgtgagatgttgggaaaatatggctcctccttagagttcacagaactcctcacactggtgaacaggaaagtttctcagcgccgagtggacttttgcaaagacccaagtgcaattggaaagaagcaggttccctgttttgcctcaatgctaactaaaaagctgcatttctttccaaaatctaattaattaatagaggctatctaattttacactctgtattgaaaatggctttctcagccaggcgtggttactcacacctgtaatcccagcactttgggagtccaaggtgggcggatcacctgaggtcgggagttcgagaccagcctgaccaacatggagaagccccgtctctactaaaaatgcaaaaaaaaatttagctaggcatggcggcgcatgcctgcaatcccagctacttggaaggctgaggcaggagaatcacttgaacccaggaggtggaggctgcggtgagccgagattgcgccattgcactccagcctgggcaacgagtgaaactccgtctcaaaaaaaagaaaatgtctttctcttccttttatataaatatcgttagggtgaagcattatggtctaatgattcaaatgttttaaagtttaatgcctagcagagaactgccttaaaaaaaaaaaaaaaaagttcatgttggccatggtgaaagggtttgatatggagaaacaaaatcctcaggaaattagataaataaaaatttataagcatttgtattattttttaataaactgcagggttacacaaaaatctagctgatttaacttgtattttgtcacttttttataaaagtttattgtttgatgtttttaaaggtttttgaaatccaggaattaaatcatcccttaataaaatattcgaaattc

SEQ ID NO: 31 - DNA, 51748 bp, Homo sapiens
aacaaatatttcccgaaagatccaggagcagcatctccaccagcaagctgggctgctgggtgggtacttccttcaaagctgagggagcgtcctacgcccacgcgcgcaggagggcgccccccgcaaagcaacgtctaggagaccacagtggatgccacagcgggcccgaagcggatcagccttgtggggtacgcatgctaatgtaggcgtggagtcccccagggggacgccagcagttccagctgggatccaggtttcgctaggggagagcctctggctatgggaaaggggtctccgagttgatgtgaaggcccaggtcgaggtgtacactgggggcggggaagtggaggtgaccacacgagcgccccatcactgagcgccgccgcgaaatctgcgctctttgggtcacttggagcgcggccagtttggcagatttgtttttttcccggaacaacccgcggcggctcggctgtcccgggaaactgcaaactttgctgtgcgcgttctcccgcgcgcgggctcaactttgtagagcgaggggccaacttggcagagcgcgcggccagctttgcagagagcgccctccagggactatgcgtgcggggacacgggtcgctttgggctcttccacccctgcggagcgcactaccccgagccaggggcggtgcaagccccgcccggccctacccagggcggctcctccctccgcagcgccgagacttttagtttcgctttcgctaaaggggccccagacccttgctgcggagcgacggagagagactgtgccagtcccagccgccctaccgccgtgggaacggtaactgcagcccccacctcggccggcgcctctccagcccgccggccgtgcgcgccttgcctccctccttcctgccggcttcctagttcccccctgcgcccccagcgtggtctaggggagcctggttgagtgggactgagtggccccgacggcctgcgctgaaactttgggaagagggcccgttccgctctctccatcgcttgccttgctcagcttgtcctcccttccctcctagccggggggctaggggacacctcgtactattcgagatttaggagaggagggctcgtgatctggcacagcggctaacagcgagggctcctttgcctgcgttccggtccccaccccttgcctgccggcggtgggacctcaaccctctctctgttaaatgggaaccacggtgatccccgcagactgttggcggggatggacagagttgattatggtacgcgtttcgcggcagtggctctgtcaagtctgagtacactggagctgagcgtccttgctgcagggctcttagagggaccttgaggaggtggaaaccaggcaggagacatttagacgtgtggagtgttaggctccaggtgacagctttgcggtttatggagcagtaaaattacttgtgggtgattgtgggtgtatcatttccagatctttattcttgaacttctgggctcctgggctagttgacgtggccctccctgttgtctcaacttacaggctatttcctccttttgggtctcgccggcctgaccttcacccttggtaccgccattgcctagattcacagtccaccttctgccacctgtaaactgtgtggctttggacaggttacttaacgtctctgaagaagctaaagtttctgcaatagcaaagtaaaggccctggtctagcagtgccatgagccttgggtgacgcagcggagcgcttgagtgcccagcagagcctccctttccccctcccagctgctagaggcaagagggggaggttttcaggtcttctctgtgtgccctttaggaagatttttatttgggcaagaagtgagtcacaaattgtatgatgtcacttttcaggggaagcagctgcagtccatttcccccttcatgaaagtaaaaagttcagacaatagctgggcagtgacttcttacccagctgtgtaccagttgccccaacatgtgggctcctgttcaacatgtttagaaataatcactacaggaactttttttcagtctctacaaaatctttttaaaatatggatgtggtttttaaatatcggcaaaggttgacagttgcatattatcttagtctcgtgggcagtggtgataatgggaatatttcttgactatttagattgtgccacctagcattttacatgcattgtttcattcatcctcccaaccacctgtgacataggtactgttgttttcccattttacagatgaggaaactgaggcttagagaggtcgagcactttttctgaggtcccatggctaatatgtggaagaactgattcagccccagatctcagggttctcaaccaccctcttgggtctccttggttctgctgtttggacagcagtttattgaaggggctgaaggatttgaaaatacatttaagttagatttataaagaaaaatggatttggtgcctgccatgtacctgacatttttctatgattaaaaaaatgattaagatgaggtctcagtctgcaaacagtgacaatcttggtggctaatagtaagaataagagttacagtgactaaccaagacttactatgtgcctatcattgttagtgctttgagtgtctcatgtattaatttatttaaagagaagttagacatatttaacagtgggataagcaatctccctcaaatgactgctctttgcagcctggaccttaaaaaggggacagatatgagaaaataatgccatgtgtaccctctacggacagcttggcagaactgagataggtctggattttcttggtgcactgtgatgatgaaaggaggaaataagaggtcaaaaccaggtcttggtttgactgaaatgacgtgtctgagatcaggcattccccacttggttaccaccctgggctatgatcgctctttggaggttccaaaaatcaagcccagtctcataggaataagaaagtaactaattgtttagctttacagatttgaaagagccaagtcccaccactgctgacttggattgttagaagagacactttctgtcactgcagacagtgttcagcatcaacccagaaggatgcggtaggtttcagacagaagacctaatggcctactgtttggagggaaagttctagaaagcgtcccatcattgagccacagaaatcagcctgaattttacatctcagtagctaagtccaaagccctctcttagtgtctgagaaggatgagtttaagctatacccatcctttggtggaacatttcaaatgtttaatgagtgcacagttctctctgcctgcatcgctcccacctaccctctctgcttcccccttttcagttctcaggtcagacatttcctcccctgaggagtttccctaatttctgtgaggctcttgagtttccctggtatggctacagattgttcaccctcaaggcatacaccacagttgcatttcaaactagacgccatcctttttttcatgtctgtttctcaacatggcaggaccaggtcaatttgctcacaagtatatccctaattcctaacttctagtaaatatccattgaatgaatgaagaagagtctccaaaagtctcagcagtcccaataatatcaaaacaaaggcttggctttcttaggagccattttgcttagggtcttcccctttttcaaaaccactttattaaggtatagttgaaatataaaaagctaggcatagttaatgcatgcatacctaccaagtttggagataagcatagatacacccatgaaatcatcaccacctcaacaaagctaccacctcctaaagtttcctcccacaccgtttaatgctattattactattatttttattactactattttttgaggtggagtctcaatgtgtcaccaggctggagtgcagtggcgcaatctcggctaactgcaacttctgcctcccgggttcaagcgattcccctgcctcagcctcccaaatagctgcgactacaggcatgcaccaccatgcccagctaatttttgtatttttagtagagacggggtttcaccatgttggccaggatagtctcaatctcttgaccttgtgatccgcctgcctcagcctcccaaagtgctgggatcacaggtgtgagccaccatgcctggccaaaactagtattttttgtgtggtaagaacattcaccataagatctacccttttagcaaattgtaagtataccatatagtattgttagctatgggcactatgctatataggagatctctagaatttattcatcttgcacaactgaaactgtgtaccctttgactatcacttccccatttcttcctcgctgcccccacccccaacctctgacaacctccattctattctccacttgtatgagtttgactctgttagattccacatagatgtgagatcatacagtaattgtctttctgtgtctggcttatctcacttagcgtaatgttccttaggtccatccatcttgtcacagatggcaggatttccttctttttttatggcagaataatattccattgtgtgtgtataccacatattctttatctattcattcattgatggacatttagattgtttccataatgttacagtgaatgtgggagtgcaggtatctttttgagatcctgatttcagtttctctagatatatagccagaagtgagattattggatcatatgcgatttctagtttcaattttttgagaaacctctagacagttttccataatggctgtaccaatttatattcccaccaacagtatagaagagttcccttgttttcacatccttgctaacacttacctttatacacacacacatatatacatacacatacacattatatatgcatatgtgtatgtgtatacacacacacacacacacatataaaatagctatcctaacagttgcgagatgatatcttattgtggttttgctttgcatttccctgatgattaggaacattgagcaccttttcatatacctgttgcccatttgtatgtctttagagaaatgtctattcgggttctttgcccatttttttaattagattttttttttttttttttttttttgctattctgttgtgtgagttccttgtgtattttggatattaaccccttttcagatatatggtttgtaaatattttctcccattccataggttgctttttcgttttttgtattgtttccttgctatgcagagctttttagtttggtgtaatcccacttgtttatttttgcctttgttgcctgtgcattagcatcatatgcaaaaactcattgtcaagaccaatgtcaaagagctttctccctatgttttcttctagcagttttaaggtctcaggtcttatgttgaagtctttaatccattttgagttgatttttttgtatggtgtgaaataagagtctagttttattcttttgcatgtggatatccaattttcccaacaccatttcttgaagagactatcctttccatattgaatatttttggcacccttgtcaaaaattagttgactgtaatgtgtgggtttatttccagactctctattctgttccgttgctccatgtgtctgctttatgccagtatcatacggttttgattactatagctttgtaatataatttgaagtgaggaaatgtgatgcctctagctttgctcttgctcaagtttgctttggctatttagggtctttcgtagctacatatgaattttataatttttttatatgtctgtgaaaatgccattggaatttagatagggattgcattgaatctgttcagtgatcaatttgagcagcatggacattttaacatattaattcttccaatctatgaacatggaatatctttccatttatttatgtctaatttctttcatcagtgttttgtagttttgttgttctggctcaaagaagagcagtgtgttgcttaatttccacatatttgtgaattctctaatttctctcctgttactgatttctactttcataccatttgtggtcagaaaagatacatgatatgactttaatcctcctaaattaattaagacttgttttgtagcctagcatatgatccatcttggagaatgttgtgtacacttgagaagaatgtgtattttgctgctgttggatgaaatgttgtatatatgtctgttaggtccatttggactagtgttgttcaaatccactgtttcctaattgattttccatttggatgaaatatccatagttgcaagtgaggttttgaagtcccttactcttatctattgctatttctttctgtagttctattaatacttgttttatatatttaggtgtgctaatgttgatgcatatatatttacagttgttatgtctttggtaaattgatatctatagttataatataatgaccttctttatctcgaaagttttttactttagtctattttgtctgatataagtatagccccccctgctctcttttggttaccattcatatggattatctttttatatcccttcacttttagcctatgtgtgtccttaaatctaaagtgagtctcttgtaaatatcatgtagttggatcttatgtttttactctatttagtcactgtatgtattttgattggataacttaatccatttacatttaaagaaattattgataggtaaagggctcactgttgccattttgtgattgttttctgactgttttatagttcatctgtttctctcttcctctcttgcttccctcccatgtgatttgatcattttttgtagtgatatgctttgtttcttttctgtatatattttgcatatctactacagatttttgctttgttattaccatgaggcttacacaaaacatcttataacgttctattctaagttgataacaacttagtccatttgggatgctattacaaaataccctaaactgggtagcttataaacaacagaaatatatttcttgtagttctggaggctggcatgttgaagatcaaagtgctaacagcatcagtgtatagcgaagtttcatttccttgttcatttattatatcttatcacatggtagatagggcagggcagctctctttatataaaagtgctaatcccatttatggagctttacccttttgacctaatcataccccaaatgccccacctcctaatactatgacattggtgaatagatttcaatgtgtaaattttggggggtacgtaaacattcagaccatagcaacaacttaacttcacgcacattcaaaaattctgcagttttattctctccttccatgttttatgttattgatgtcacagtttacatttctttatattgtatatctattaacaactatatagctatggttattgaagctagagttgtttttaatactttagtcttttaactttagtagagttcaaagtgatttatgcacagctaatacagatgctcctcaacctatgatgggtttacatccctataaacccaatgtaagttgaaaatatcataagctaaaaatgcctttaatgcaactaatctattgaatttcagagcttagcctagcctgtcttaaacatgcttatatcacattagcctacagctgggcatgagaatctaatacaaagcttatttaataataaagtgttgaatatctcatataatttatcaatactgtactaaaagtaaaaacaggatgggtgtatggttacttgaagtatggtttctacatgatgtgttttgcttttgcagcattggaaagacaaaagatcttaagtaaaaccattgtaagtcaaagaccacctgtaaattattcacatattctggatttgactatacacttacttttaccagtgagtttaaagaatgtcctttcatttcaacctgaagtattccttttagcatttcttgtaaggcaggtctagtagtgatgaacactgtcattttcatgtgtctcagaaaagtatttatcttttcttctgaaggacagctttgctggatataatatttgtggttggcagtttctttcttttagcactttgattatattatcccactctttccaggcctgcaaggtttctggtgagaaatccaccagatggtcttatggacatttctttgtatgtaatgaggtgcttttccgtgtgtgtgtgtgcatgtgtgtgtgtgtatgtacatgtatacatgtacgtacatatatatgtatgtacatgtatacatgtacgtacatatatatgtacgtacatatatacatgtacatacacacacgtatatatcaatagcttttggagtacaagtagattttggttacatggattaattgtgtagtggtgaagtctgagattttagtgcacctgtaacccaagtagtgtacattgcacccaatatgtagtttttaaaaatcccacatcctcctcccactctcccctcttctgagtctccagtatccattataccaatctgaatgcctttgaatgctcatagcttagcttccacttacaagtgaaaacatagatatttggttttccattcctgacttacttcacttagaataatggcctccagctccatccaagttactacaaagacattattgtaatgtctccatcttcatttctctttctttctttctttctttctttctttctttctttctttcctttctttcttttctttctttctttctttctttctttctttctttctttctttcctttctttctttctttccttccttctttccttccttccttccttccttccttccttccttccttccttccttcctttctttctttcttttctttctttttgagacagagtcccgctctgtcacccaggctggagtgcagtggcgcgatcttggctcactgcaacctccacctcccgggttcaagcgattctcctgcctcagcctcctgagctgggactacagccgtgtgccaccatgcctagctaatttttgtatttttagtagagacagggtttcaccatgttggccaggatggtctcaatctcttgacctatgatccacccgcctcagcctcccaaagtgctgggattacgggtgtgagccactgtgcctggccctccatcttcatttctgatttagcttatttgaatgttctctcttcttttattggtaaatctagctaatggtcccctgagtttatcttttcaaggaagcaactttttgtttcattgatcttttgcattttttgtttcaatttcatttattctgccttgatctttgttattttcttctgctagctttgggtttggtttgttcttgcttctctagttccaggaggtgtgactttaggttgtcaatttgtcatctttcagactttttgatgtagatatttagcaccacaaactttcctcttagcactgcttctgttgtatcccagaggttttgataatgtgtgtcactgttatcattcgttttgaagaattttcaaatttctatcttgatttcattgttaacccaaaaatcagtcaggagcagactgtttaatttccttgtttttatatagttttgagggtttcttttggagtcgatttctagtttgattctggtgtagtctgagaagatacttgatatgattttcatttttaaaaattaattgagacttattttgtggcctatcacatggtctgtcttagagaatgttccatatgctgatgagaagaatgtatattctgcagttcttgggtagaatgttctataattatccgttaggtccatttgttctggagtgtagtttaaattcagtgtttctgtgttgactttctgcctcagtgatctgtctagtgctgtcagtggagtattgaagttctccaatatcattatgttgctgtctatctcttgtcttaggtctagtggtaattgttttatgaatctaggagcttcagagttatgtgcatatatatttagggttataatatcttcctgttgggtcaatccttttatcatactttctttgtctttttgtttgtaaactgtttttctttaaagtttgttttatctgatataagagtagcaacttctgcttgctttcggtttctatttgtgtggagtatctttttccacccctttaccttgattctataagaatcctttgtattaattagctcagcttcttgaagacagcagacatttggtttgtgattttttttttaatccattctgccaatctgtatcttttaagtggagcattaggccatgtacattcaacattaatattgaggtgtgacccaatcatcatgttgattgttacctggatactttgttttttttattgtgttattgttttataagccctgtgagttttgtgtttttgagaggttctattctgttgcatattgaccttttatttcagcgtttagaattccttttagcatttcttgtcgggctgatctggtagtggcaaattccttcagcatgtgcttgtctgagaaagactatatccccttcatttatgaaacttagttttgctgtatacaacgtttttggctgagagttattctgtttaaggaggctaaaaatagggccccaatcctttctggcttataaggtttctgctgagaagtctactgttagtctgatagcttttcctttgcaggttatctgatacttctgtcttactgctcttagaattctttccttcatgttgacattagtaatagcctgttgactgtatgccttggagatgtccattttgccatgaatctccccgaagggctttgaccttcttgtatttggatgtctaaatctctggcaaggctagggaagtcttcctcaattattccctcaaataaattttccaaaatttttactttttcttctccctcaggaacaccagtgattcttagctttggccattttacataatctcatatttcttagagactttgttcatttcttttagttattttttctttatttttgtctgactgggtttattcaaaagccttgtcttcgagctctgaaattctttattctacttggtctagtctgttgttaaaactttccacttgttttgtaactccctaaatgtgtctttcatttctagaagttctgattgtttttttttcctctaaagtatctatctctttagaaaaattttcattcatatcctgaatttttaaaaaactttctttatattggttttcacctttttcttgtatctccttgggtaacttaataatcaaccatttggattctttatttggtatttccaagatttcatcttagtttggatccattgctggaaagctaatgtgatcttttgggggtgttatagaaccctgttttgtcatattgccagaattatttttctggttccttctcatttggatagactgtttcttctaattatttttgaatttatttttgattcaaccgtttctttctaatttccttttttccaccttatggatgtgacttcaatgattatagcttattgtaacctaatttggctctgggtgcttttggcggtgaagactctgtataagttccttggttatagagagtctttgtatgatggttttctcagatgtagtagcaatgtgcttcgtgtgtgagcaggttgactgtctcttgtggggttggaatggcaaaagtctctgaagctcatccccagtggtgtgcacttatttatttattcatttgttcattcattcattcattcattcctccagtattactgggttgaacagttcaggcttcaagtcagtatgggagttgtccctgggtaaaaactgggtgtgcctaaaacaggtagataaatacaatacctaatggagggcagaggtcccagccttgacgtaggcggctggagaagctgtcattgaaaaacactgaggtcttttcagggggaaggaaggggctaccccagctcccatcccaggccagcaggagaaaaaactgcctcccattcacactcctgacccagtgttctgtccattcaaaccaggcagacaccactttccagctgcagaaatactgatgttccatgtagagagggattataattacccctcatgcaagcctgaaccttgagggcacttgtcctatgaggatgcagtcaccctgaagtgttctagaaaggctgtctacagatgcacccatgccacgctcttgtgggagaagcccaagctgtagctgcagtggtgggtgaggaggaaaagtctccttctccaagacctgtcacaagcaccagggatgcctgactgttgtagtagagccacagactttcccttctgagttcagcattgcacctgtgcctctgctgaaaaaaacttcccacaagcagaaagctatgggactcaagctttgccatctggattcttttgtcccatgggttactcctttgatgtggtgcactcccccttcccctaggagtaggagccctgagggccagactgttgtgaatgctgctgcttctctgggtctagccacccagtggggctgccacactccaggaaagtgccggggaatgtctgcagggggtccagtgatgcgacctgccctcaaatttccagcagtaggtaccagcatctgttctgatgggggtggcagggaagtgacatagactctgtgagattccttataaatagccttagtgtgttggctttctcacacactagctatagtaggaatgaactggtcatgtggacagactcaggacctactgattagctgggggtaatgcaggcagtggtgacagatggggtcatgcgtaagttttctccttcctgggtgctatgttattctgccagcagatgctgtaatggactgtgttggttggcctccaggcaggaagtggcacttggaaaagaacaccagctgcggtggtagcagtgggatttgtgcttcttatgttacccaggtgaggtactctggtgtctcagacaatgcgtgaggccatagagcttcccaaagtttctgtcctttgtgttaagctatggagtagggggtaaaggggcaaagccaggtgggggctgggtcacgtaagtacatgctatggctctccatgtgtgggctcaagcagaggccccagtggggataagagggcagtcctcttgccgcaggggtaatgttccagggaggagtgcaactgcctgtgctgcacagaaagtccacacagggagtggggagtagcaggtgacagtaagctctgcccagttcccatgcacttggcaaggtaggtctcacaccggtagtgttccactagtagcagctagctaggttccaggcattctgctctcagaactcaaaactgccccaggccataagccttcccagttgagacataccatggctttcaggccacgccccttctggtctgcctgagaaacaaaggtacccagctcttgtgctcgtgagtataacccactgcccactcacccctcggttctggccaagggggttcatcgtcactcgagattatatcacaaatgtcaattgggaacctctctcaacctatgacagactactgagtttgctggaagatgtccacaaggtcacctgtgaggtaggacctggaatgacttccttctatccctgctggagaccgagagcacatgcaatgcacatcccaatgctattccttctcatgtattccccagtgctcactaaatcagcttcagtgctgggtagggttaagacctttccctgtggcctggattgccaagttctccagtgggaatgtatgtcccagagacagtttatccccctcacactccagggacttagaattttctacctggttcacagtataggctgcagcccaccacttctttcaaaggctctgtggtttctttcagttttcctattaagttcctgtgttgcttcttggaaaaaagtacacagcatgaatctctacacactattttatcttcccaagtgagagaggcatgctaacaatgcctccaatctgccatcttggaaaaaaatcagttgcttttcttttgctgctttcaagattttctccttatctgttttgactcttaccagtgattgtaatgtgtctcagtgaagacctatttatgcccaatctgtttggggttctttgggcttcatgaatctagatgttcctttccctctccagatttgggaagttttctgtcataatttctttaaataaactttctacccttttctctttgctccttctgagacaccgatactgcatatattggttcacttgatggtgtccaataaattgcataggtttcttcactctttttcattcctttttctttttgttcctctgactgattaatttcaaatgatctgttttcaagttcactgactctttcttctgattgatcaagtctactgttgaaactctcaattgaattttttatttcagacattgtattcttcagctccataatttctgtttcgttcatttattggtttttatttctttgttgaacttctcattttgtttatttgttgtttttctgatttcatttatttgtctgtctgctctcttgttcctcactgggcttttttaagatgattattttggattctttgtcaggtaattcatagatctccatttctttgggatcagccactggagctttattttgttcctttggtggtgtcatatttccttgattatttgtgttctttgaagcctcgcattgtgtgttcacacttgaagaagcagtcacctcttcccgtctttattgactggctttaggagagaaagacctttgccagtgagcttagctagagattctggggatctctcacactttttctctagatatacctgctccacacctcttgttccctctttgggattatatgtgttctctcagtcctgcaaaggcagaccttgtgctaaaagcctcctgcttattccttagggtagtaccctgaaatgttcaaagttatatgtcttctctcaatccatcaaagttgagctggctgctaatatccctacctgctgttgagatccaagcattgtctgtggttgtgtacagactgttgtgcactgaggtacatatcagctggttgaaggggtacataggcaagttgtcctgcagggtttatgggagggacttagggtagcatccatgagctgggtagcagaatctatagccggcttttgataaccatacactatttgcactcctgctgctgcttctccttgctcctggctgccccagacgattcagccgtactattcccctcagtgttctgggtgggatgaaacagaagtgggtctcctagacaacatccttttgggctgggaaagctgggtgctcacttcactctcacttcccccatgggagaattgtgagctggagggacctctcttggaactgagctgtgccaccttaggggaggggtgatgtgggtaaagtgagctgctcttattatactctttgatgcatccactcttcgattttttgctccaccagtgtgctgaaacctctcagtggactcctgtggcctcacaaaagtattcttgtccataggtgtagttgccaaaatcagtatttctatataagaatgaaaactggaacctcctattccgctatcacactgacatttcttctttcttttaaaaatagtggttatattgtgttgtcatcatataccctagattgagcctttaagattaactttagcaaaagggccaacttgattaacaccacatatcaaagttagtgtctttgtctggtggatttttttaaaactttgacttactagttttgaaaatatgtgagtgtgtattgtgttaataacagtctatattggaaagtaactaagtctatgtaaaggagacaagagaggctatcaggtattttctgcatgtgtggccttatgcttatctcctctgtgagttatctccatttttgagaaactttgggttctaatctgaaaaatctgcctcccaaccagaaacacattggtgatgatgaagggaggctcatgatgtgttgagaaacaaggtgaccatctgacttcccatggtcattgtagagacctggcagtaggactttcccttcttagctccctcccctcttcccagttcaccctcagataagctggaaggtgacaccataatgccattcggagtgcaaggccactaggttgtcactttgcctccttggacacctccttctgaactgcattccttctccccacctccaaaagttattacttgtgctcagcggcacaaaatattctgtaaagtagatgccttcttgttttccaacttaatgacagcatccctgggtgagccctaactggaatacagaactgcacctgacaaccgcggcctgctcagtgaagttgctcagggattgtatcagaggcatttgaaccggagcaactccatattgaataggggctgggtaaaataagactgagatctactgggctgcattcccaggaggttaaggcattcttagtcacaggatgaggtaggaggttagcagaaggtagaggtcataaagaccttgttgataaaacaggttgcagtaaagaagccagccaaaacccagcaaaaccaagatggtgacaagagtgacctctggtcaccctcactgctcattatacactaattataagccattagcatgctaaaagacactccccccagcaccatgacagtttgcaaatgctatagcaatgtctggaagctacgctatatggtctaaaaaggggaacttccttagttcctggaatttcccaccccttccttggaaaacttgtgaatagtccaccccttgttttagcatataatcaagaaataactatgagtatccctagtccagcagcctaagctgctgctctgcctatggagtagccattcttttattcctttaccttattaataaacttgctttcactttactctatggactcacccttaattctttcttgcgcgaggtccaaaccctctcttggggtctgcatcaggacccttttctagtaacagttgggaccaggtagaaattggagtctgaagtttctctttattcctgaaagttgatccctgatcccttcatggggaagaaaatgggacttgatttaggagaagtgattctaatactggccaggtgcagtggctcacacctgtaatcccagcactttgggaggccagagtttgagaccagcctggccaacagcctggccctgtctctactaaaaatacaaaaaaaaattagccagatgtggtggtgggcacctgtaatcccagctactcgggaggctgaggcaggagaatcacttgaacctgggaggcggaggctgcagtgagcggagatcacaccattgcactccagcctgggcaacaagagcaaaactccatctcaaagacaaaaaaaaaaaatgattctaatactggctctgccttgggccagccacatcacctttagctaattctttccccttagggtgtgtgtttcatccagccttccattcaattaaatattttagtaagcaccttctgtgttccagctacctctgccataatgaacttatattgtcttataggagccaaacagcagagcgcaaataaacaagccacatacgaaggctatgcgggaaatgaaggcagagggtgggggtggaaagggccaggtagtaaatatttttggctttgtggccatcactcaactctgctcgtagagaggaaacagccataggcaatacataaatgaatggacatggctgttttctagtacaactctatttactgaaacaagtgttgggccatagtatgctgattcccagactagatcagaaagggccttaaaatccaaggagatggctttagatttgtacttatagttaatggggatctcttgaaaattctcaagctggaatgtaatttgatggaaatctattttgtgtagaaccgtgtaaaagcatctgacatagaaagagagcctaataccccaggttgtcgctgcttttgaattgcgtatgagcactttgtgacctgctaggaatttagggggaaattttcattgttgtaaaccttgacagaccttccactgtttcttgtatgcagtgaacatacaacaaaattgtggttactggattagaagctccctgagggcaaggactttgttttctttgttgccatatatgtagtctctgggatgtaagcatattcacatatttgaatgcattaatggggcggtaaccctgaagcttaaatatgcaaaacttctcacccctaggcgtaatggaaaactgtatcacctaatgagtgtcatttaaaaatatcacagtatcagtgatgccactgaccttgtggctttttttctctcttcccagatggcagatgatcagggctgtattgaagagcagggggttgaggattcagcaaatgaagattcagtggatgctaagccagaccggtcctcgtttgtaccgtccctcttcaggtaagtttgcttaatcagggaccctggaccacgtcagcctgccatgcctctgccatctccacccacccatggggagggggacattcagggaaggaggttcatgctgagcatgaggtttgcacaggttcttgctagctgtacgtagcaacactagtgtcctcatgtgcaccctgttgtctgtgggccaagcccaggaatggacaaaagcaaccactgggagtctcctgctcagccgctgagtgtctggtagcagttcctaagtatcaggggctgttctcattagaggtgatttgcaggcaccttcagaacagagcctgggctgctgctgccagtgggaccaagtttgacaacacagaatccaagggctgagggacaggaggttttagggtgactcacgcccaccctgtgtctcctgaggcattgcactgatggaagggagattgcatcctgttcattagttcctacctttccatttcttgagctcacttttaaaattctaaattttgcatttaataatataatagcttcattgattaaactcttgtatgcctgcttggtattattgcatttagtctacataattgcacatttagttttattgttatcaccatttgtcaggtagggaaactgaggtgctgtgaggttgaatagcttgcctttttgctgatagttagtaaatggtaaagctaagatgagaaactaaacaatgccagcaccactcacttaaagattctgctgtgtgcttcccatttaaaagtcgggctagcttggtgcagtggcttacacctgtaatctcagcactgtgagaggccaaggagggaggatcgcttgagcccaggagtttgggaccagactggacaacacagtgagagccccgtctctacaaaaaaagataagaaaattagctgggtgtggtggcgcgtgctggtagtctggctactcgggaagctggggcaggaggatcacttgagcccaggagatcgaggctgcagtgggccatgattgcaccactgcactccagcctgggcaacagagtgagactctgtctcaaaaaaacaagttgtttttttttttaataaaaaatataagtagggctgtaaggacatggaggaaccccaaccctcccttaaccttgatcatggatggacagtgagtggaacttcttgagagacagaaggcagcaggagtcagacgcatcacacttctttggattccctaagccaagtcctactgggaaagatagagagagggataaaggccgaggttagggagtgctcccaggcagtattcaggaggggaagagctggtggggatgggcagccaggctcccaacaccccagagcagaccttgggccatatcatccaacataggacttggaaaagtgggagaaccccaacactgtggacccagattccgttgtttgccagatagagtcaagaatatccaatgaaatgaccagaaaatacagttctgactcctggaactttccaaaaccatgagaaatcggtgcaggccaacttactccccaaggaaagccccttagagcaatggtcttcaaatgcctttgcttatatgtgctcaaaataatataaagctgtgtgtatattttaaggtaacatacacatttttgtcaagatagttgcaaaaaatgtaataatatttcactcttccgaaccctttttgagtatctgacttcagcaagttgtctacaagtgaaagaaacgggaatcatttaataatcattttgtaagtcagtttaagaacagactaatacacaggactccagctcagcaaagccttttgatgtacttcccagaaattattaaaataaatggtgtgttgtaaatactgacatttcaaagtcgtttctttaaatgtacccagtggaatctacatccatagtgattttataaccacctttatccattaaaagaatacatgaacagctctcctgtaacagctagaacttttatgtcttttttcccttcaaacttggttttttcattctcttttcctccacattttcttctgatgtaatagatttagttgcttgaaagtcttattgatcacaccacatcatatacctatgtaacatatacatgtatgcatatgtgtatccatataaattttaagacagttttctagatatcatgagtattaaaagaaagttctcctagactaagttactgtttcagctttaatgaattcacaattgatctgaaaaataaatgttaatatatcattaatattattaaattgtcattcatcaaaataattattaaatagaaattgcattgaagtttcaacttataatggaatgaaggggctcttaataagttagtttctaaagaaatggacaaataatacttattgctggaataagaaagaatttgatattacctctttttcctatttttcatttttagagataagatgcactgagaaatcatgaataaatacatgagatggtaggagttttgttacagtcatgtcacttaattctttgaattccttctgagttctggaccaaaaaatgacaacttgattaggtctttccttaattatgttggaagaattggcaattatctaacttacaaaaggaattatcattccgccttaaaggtatttaatttttttagtttctgggaagtacaccaaaaaacttgtacccaaacttctcaaacagttgtaaattaaatttgctcttcttttatttagaggcagtctgtttaactcaaaatgttccagaaaagataattaagcattaataaacatttgtcagtatcctttttttgataaaatgcttttaaaccatatgctttttaaaatgtatttttgtcaagacgttggagttgctaatgcagctcattcatgtatgaaaattgtctgctctataatctaatggacagagccagtccctgtcaaaccagttagccataccacacttgtttgctgtcagtaaaggtctgataccatttttcagttcagtgaatatgttattaggcatccttgtgacagtcatcttgtttctgaattctaaatttttattcttggatagatgaatggatggatgggtagaagggaagaaggatgaaaggaagaaagaaagggtaccaagcccagccatgccatgtttacctcctggaatcagtgtttgttttgttctcacaggactgatatggtttggctctgtgtccccacctaaatctcgtcttgaattgtaatcaccataatccctacgtgttgagggagagacccggtgggaggtgactggatcatgggggtggttcccccatgctgttctggtgatagtgagttctcatgagatctgatggttttatgtgtttgacggttcctcctacacacactctgtctctcctgctgccatgtaagacatgtctgctcccccttccaccatgcttccccagccatgtggaactgtgagtcaattaaacctcttttctttataaattacccaatctcaggtagcatcttcatagcagtttgagaacagaccaatacataggactccagctcaataataaaaaatctttggaaataagggaacgaaaaaggcaaagacattaaataagaaccatcatcacttccatttcattctattatatatatatattttaacacatttttcagtatatacaagcatactttgttttactgtgctttgcagatactgcttttctttctttcttttttttttttttttgagacagagtctcactctgttgtccaggctggagtgcagtggtgtgatcttggctcactgcagcctccgcctcccaggtacaagcgattctcctgcctcagcctcccaagtagccagactacaggcgtatgccaccacgcctagctaatttttatatgtattttagtaaagacaggattttgccatgtttcccaggctggtcttgaactcctgaccttaagtgatccaccccccgcttggcctcccaaagtgctgggattacaggcatgagccaccacacctggcccagatattgcatttttaataaatggaaggtttgtggcaaccctgcaaacctattggctccatttttccaacagcatatgctcactttgtatctctatgttacattttggtaattctcacaacattttaagttttttaattagtgttatatctgttactatgatctgtgatcagtaatcttttttgttgtcgttgttcaaatccaggataatctctgtaaatgtgatgagtgatctttgatgttactattgtaattgctttggggtgccacaaagcacacctgtataagacagcagacttaaatgataaatgttaagtgtgttctgactgttccacccactggccattcctgtctctctccttctccttgggcctccctattccctgaggcaatattgaaattgggccaattaatagccctacaatggcctctaggtgtctattgaaaggaagagtgatatgtctgtcactttaaatcaaaagctagaagtgattcaacttagtgaaggcatgttgaagccaagacaggctgaaagctaggcctcctgtgccaaacagccaagttgtgaatgcaaaggaaaagttcttgaaggaaattaaaagtgctattccagtgaacacacggataataacattattgctaattattgctgacttggagaaagtttgagtggtctggatagaagatcaaaccagccccaactttttcttaagctaaagcctaagccagagcaaggccctaactctgcagttctttgaaggctgagagaggtgagaaagctgcaaaagaaaagtttgaagctagcaatggttgatccatgaggtttaaggaaagaagccttctccataaaatagaagttcaacatgaagcagcaagtgctgatgtagaagctacagcaaattatccagaagatctagctaagatcattggtgagagtggctacactaaacaacagattctcaatgtagacaaagcagccttctataggaagaagatgccatctaagattgtcctagctagagaagagaagtcaatgcctgacttcagtgctttataaggatgcttgactctcttgttaggcagactggtgactttaagccgaagccaatgctcattgaccagtctgaaaatccttaagaattatgctaaatctatactctttctgtgccctataaatggaagaacaaagcctggatgacacctgtttatagcatggtttactggatattttaagcacactgttgagacctactgctcattaaaataagattcctttcattgacattgcacctggtcacccaggagctctggtgaagatgcagaaggagattaatgtttttatgcctgctaaaacatccattctgcagctcatagatcaaggagtaatttcaacttccaagtcttattacttaagaaataatgtcttactatttgagaaatattatttcagaaatacattttataaggctatagttgccataaataatgttgggaataacattatagctatagtgttaccgctgatggatctgggcagttaattgaaaaccttctggaaaggatgcaccattctagatgccagtaagaacatttgcgatttatgggaggatgtctgaacattaataggagtttggaagaagttgattccaaccctcatggatgactttgatgggttcaagacttccttcaatggaggaagtaactgcaggtgtgccaatcatggtggaaatagcaagagaactagaattagaagtagacctgaagatgtggctgaattgctgcaatcttatgataaaacttgaacagataaggagtttcttcttatgaataagccaagtaagtggtttcttgagatggaatctactgctggtgaatgtgctgatacatttttgaaatatacatttagaatattacataaacttagttggtaaagcagccacagagtttgagaggattgacatgaattttgtatgtgttttaactctttttttgtttgttttcttttaaactttttccttttttttttttttttttttttttaacgaacactttcgttgagggctgactttcaatagatcgcagtgagggagctgctctgctacatacgaaaccccaacccagaagcaggtcatctttgaatggtttagtgccaggttcgccaggaacatgcattgcgtgacaggcgaggggacaatcacctttctgttgacttgaattttgaatgaagttgtactgtgaataaaatgctatcaaacagaatggtatgctacagagaaattgttcataaaaggaagaatcatttgatgcagcgaacttcattgctgtcttattttaagaaattgtcacagccaccctaattttcggcagccaccaccagattaatcagcaggcatcagtgctgaggccagatcctccaccagcccaacagttacaacccactgaaggctcaaatgattgttagcattttttagcaataaagtatgttttaattaagatatgtattttttggacataatgctgttgcgtatactcagactggagtacagtgtgaacataacttttctacccactgggaaaccaaaaaagtcaggcgactccatttattgcaatatttgctttcctgtggtggtctgaaactgagccgacggtatatctgagttgtgcctatatttgaatttggaacagcccagtgtggtcccacgtacccccattactagtgacatacttcccctttatcagactcatgtataagtaagaagcccaccacagtgcctgattcaaggagactcacagatacatcttgtttgtctctttgtggatgacctggaggtttcatcaccctgtaagtgaggttcagggtgggtgagaaagtctgcccttcttttacacagtgggagatgggagaatgggcaagggaaaagtggtatctctgacagaccagttttagaaaaaaatacaagtggcagttgaggacctggccatttattcttcccttaagactgtgcacccctgggaaagtttttgagtaccttgctggaagacttctgcctaaaagaccttttattttgcaaaaatagatgtggtctgtggtatgtcccccccacccctcagctttaagttctttggaaagataaataagcctggagggtctacattctggtccactctacctttttcatagcatgactgatgttgacgtcattaaaataaacagtaagtatcccgaggtcctctctgcagtttcaggagcaccatgtgacccaatgacagatgtggggtgcgatgcatgggagtgccactggctcctctggatgttcgttgtagctgaaggtgctccgccccccccccacacccctacaaccttccctcccatcccatcccaccctattccagctcccttctctaaggagctcagaatcactgttaggcagtggaggaggcagtagcatctctgacctgactctaatcaaggaccagactgctcacctgccctcccctggagacatgaaggatcctgggttgcagaaagaaatatccccttccccaaaaagccagggtgggactcaggtttcaaatactaacagtttcaagcccctagacttgtcttggcctttttttttgcctcacagccactagatggcaggacagcatcgttttatttccagtccataggcactaaaaatccagcctgttctttaaaaaaatatttagtgattttgtaattttctgattattgaagaacatttggaaaacacagaaaagcacaaaaaaaatccaaatatcttaaaatttgtaaagcattcagatttttagttatttagaggaaatcattgtggggccagtccatattcattatgaaccacagtttatagaacagggtctagggtcctccttgcacttgaacagggttctgtcttgatgtaaatataaccctatagtccttgccctggatataaagtcaaagttttaaccaaatgcctaggcacagctacagaaaataataactaattgctgaattgtaggacatagccttggagctgtgggaggttgaggagggaaggataaggaaggactggaggaggagctgaaacttgagttgtcaggaaaagcagggggggtatcaggggaccggtggaacctcagggccagggtggagatgatggtcaggcaaggccaccgatgtggcttctgcctaggaaagtgggcaaaatctgctggacagggtgagttaggtcttaatagcataggccacaaggagccattgtaggtccaagaccaagccctggccagcagcctagaagatattctctcctaggaacctgagaaatcagaggctcccttctgagctctgctcaaggtcagaattcaagaaaaggaaaaaaaggggaaaacaggtttcccgcagtctcagattacccctgggcctccgtggagtctcgtgtgtctctgctgaggagtttgtttacccttctggtttcccagtggaagagagcaggagaaaagatctattctcaacatttgctaaactccctattttccaggcactggctcggatcacatgggttttacccttggcatcatctctgttttccagcctttgccccctggagggtggttaataaatgccacttggttataattctctctcctggaggcatcttgggcttcttcaccagtgagtgaagatatgtaaacacatccctataaaaaatgtgttatttgtataattataaggaagattcaagtggcatcctttttcatttggagaggggttaaaaaactgttttagaagacgcaatgctttggaattagagacaagaacaaagaaggcagaccttaattcattccaaagaatacattccaagttaagcaaaaattgtgccatgatgcccattgattgaaaggggccagatctgggcccactaaagaaaatatgaacattgaaatttatgcagggcgtttacttttcaataaaggaaggattcaaattcagcttccagaaaattggatgcctgtctcccaaatttgtacatagagaatgataaagatttaatgctgtatttgaagcagtgatgacactatgtaaaataatagaagtagcaaagttgagtcagacaaccggggttcagatcctggcccttcctcccacttactatttgagggactatagcaagtcacgtgaccttcctgtgcctcagcttccttatctgcataatagagatattgatctctgcccacgggattgttatgagaatcagagtaaccgtcagcttcctgaattacctgaatgtgcctgctgaggaagaaatcatagaatcatgattttaacactgggagaacttacctaattcccttcattatgatcaaggaaaggaagaccagagaggtgatacgtagccacccaagaggaccaggaccgagacacaggcctaacttgtccagtgcttccccccagcgtcaggtggcacccacgactttggtggcaccaggctgttcatccacattaatccacccacagagtgcttttttccttccacccaagtgggtcagcaaattttcttcgtgtacacggcttcttctctgcttcactttggcagagggatggtatagggacagctgtcccagcagggcgagcagtgggctttccagtggcggagggatggcatagggacagctgtcccagcagggcgagccatgggctttccagcggcggacggatggcatagggacgctgtcccagcagggcgagcagtgggctttccagtgaagagggccaagtgtacgtttcaggagcagcaagcacaggacaccaaaacgtgggcagaggtctagaaactgcaaagctgtagcttctgcatgtgtgggatacctccagttcttttcagttattgctcttctagaggggataaattaaagtgaaaaggtaaggtaaatcatcagcttttcacagtaatagaaacctagaacactattagcagagaaaaattaagcctagtaatagaaaagtactatgaaaacataaccagttgcttctcacatgaacatgtgatcacagacaggaaatgtgagcgtggcattgcatgtttaacccctgagctgctggttttctttctctcaaggatctgtgatgatgagaattttgtttgttttgttttgagacagagtctcactctgttgcccaggctggagtgcagtggtgtgatctcacctccctgcaacctccacctcccaggttcaagcaattctcgtgcctcagcctcccgagtagctgggattataggcgcgtgccaccactcctggctaatttttttgtatttttagtagagacagggtttcaccatgttggctagactggtctcaaactcctgacatcaggtaatctgcctgcctcagcctcccaaagtgctgggattatgggcgtgagccaccctgcccgccaatggtcagttttaaggggaaaagatgggtggagtgattaaggactgaagtatgttagctgttctaatgctggaccctgcagccgtaatacagacgtattgtatcctccattcagtctattaggctatttaaagacaattcagccttttctaccccctggatgatttgttttaaagtcatttgtcaatttttattgtcagggaccctactggttttgtttttttgttttttttttttaggggaaagagggaaatgtggaggttggtatgttttggggagggggatctattcttctccttagcctcttttaaactgagtttgcttccccatgtttatatttttgcaactgactttcagagaaaaaaatgtatagagcgaattttctctcctgttcacagacctgaggatggcaggtgatcaagaggcttgtgcagggtagcaggtgtcataacctcattgtatcagcttcataccctttctagactgtggtcctgaaccaagaaatggagaaaagcgttgctgagccgttcactttataagtgtttggtttttatgtgtttgcattttccttgttgcatttggagggttgagatggggaaatacagcaactcctggatcgttcactttatgcaagatcattgaaaaatgtttgtatgcctcatttaaaaatgaagggctttggtatgcttccgtggtctcctattatttttattcacttgagtacctttaaaggaaaaacataacctaatgaacttgaactctttaattcaccacacactcacttcctgtttttgttgattaacttacatatagtttgacatgttttgccgtcatgtgagtgccgttttgcagcctggtgtagatttgggacttcggtgggttgaccatgtgtgatgctcatcaacttgaactgtatgatggtttgttctgttgatactctgtctcttgcttagctattcccctgtcgttcccaatttttcactcttaaagattgtgctcctggctgcatgtttatggaaattttgttttcttttttcctttggaccccacgctcacagacagttgcttttttccacaggagccatcccagggttgggggatgctacaatggggagccggggcatttctgccggtcagcagagaagggagaggccagtgtgaccttcccagcccgagtttgaatggtcctgtggaaaactccagcgtgcagttcactgctgattcagtcacaggccttcagggccaggcagcctgtgccagtcttctatcccctgctgagctccgagcatgttgagtttttattattacagagaagaaggaaactcacttcctgtcgtcgcagagcacagcctagttctgatgcagaggggactgttttcagatggagacactaggtactactacctgcactctttcttttcttctctgtcttgctctgtgccttaatatgttaggactgtggggatgccctctgttgagatgttgagaccatgaatgaatcatcccaaaaatatttagacaaagtggctacgaaaaccagagctctagttccgaatgaaacagctctggggaaatgtgagcctggtggtgtgtttactttcatgctgatgaatgtctgcaggcagatagagctactgggaatcctattcatggtgatgctttagaaaattaatcgcagtgggcttcttgcatgcttatattcctttccaaatatagaaaggcataattcacattttgagtagcccaggggatccataagaggataaaacctgtatttatccactccagtgatggggaaaattacacttgcacccggagtggattgtaaaaatccattgtactctttctaaggtttttcacttctttgtaaagtaggcagaatatttttatcctataacgttttctgatacaagttgctgtaggctcttcaaggatgtctttttatctaaataatcatgagagcttggttataattttttgactcttgactgttgtagtgaaaatgactgagttgacctcacactgtgaaattagaagttgcaggaaatggctctctacctaagaagttaggacactctggttccttcctgatagttgatgctggcattatttgtgttcctagcagagatttatgcttatctgaacacatctggaaatgaagatagtggtacttgcccatactggcgaagaagctcaacatgaagaaagagatgggatggttaggaagcactgggttcaacctgctgtgttaactttcctttgcattttagtgtacacttaagtgcacttaataagtcattctaccaagatattgtagtgtgttgtgatcttgcttgtctggctctaagcatagtgatttagtagccaggtttctttttttaaatctgcagtgaattgtggaacacagaagcttttaagcggatttagaactttcaattcactgctctggtttatcttggactttgcacttaatggcaggttccaaaacaagaatcctatgtttcttcgcaaagtaatcttagtaaaagtcttccgaatataaacggggccaaagtaaaggtagttgcatcagcagttagcaaagagaggaaaaagaggaggatggatagaatgggaagcgacaaactctggaggaaaaactaccctggccagttttatttgccttgtctttctttgcctctcatctgtactttgcagaatcagtgggataatgattgttaattcaatttgtaaagcataagcctataaaaatattcatacttcttcatggtgacttaaaaaatatctgaagtggttcctccaccgtttgtgtcgttcatcagcttcggaagaaagactcatacccgttgatctggacttgaaagaatctcagtggccttttcctcctgcccctccgtttggcggggtacagcagttctcacatgcttcagcatcttctgcagtgaggtcctaggaacctggagaaacaacaacagccacttttagaaaatcatgtctttggggatgattgccagctgaagaagtttctaatctggacctttgaaagcattttattttccttctttttccctccccagctcccacccctgggagaacctgctggactgagctatggactgttgccttctttgtgccattggctaattaattagcacaatctcctgggagcccttgaggccctttcttctgtccaatagcagttgtttagctgatgatctgctcgactccagcagctgatttccaagcagacagtaactcttttattcgctgctgggactgagatcacaaagcatgtctcctctgactgtgctgagagtgaattactgctcacacctaggctgccctggggactctacacagtttgttacaaaggaaggagactctaaggatgacactgcctgctggggcatttcctggaaggattttggtggtggcattaaaggaatttcagtttaatgttcagctcagctgtcattgctgggagaccttgcaggttccaaggagagttgtaaattgcccccgtggccctaaacataccctcactgctgcagaggggcaccttccagaggccgtgcttcctgaggtatgtcaggttccatctcctggccaagagccaaggagccaaaaggctgtgcacagctggagaggtgtttgataccgtagagcgagctggtgttctccgccccacacaggagtgtgaatcggcaccacgcaggaatgtggggccaacatcttccatcaacttctccacttccacgggctctggaagtaggcgaggggcttgaaacaagatcagagacagcaatgaaaggtcagagccaagagggcctatgcagtgggcggacaggcttgtcatcgtgaccctcaagcttcagagggtccgagatgctcagaccctctgctgctgccattgatcagcatgttgcttttgttctgtgcttaacactacttattggagatcatcccaggagaacgcccacacctgacctgagactcattctgtaggtctagagcaaagcataggattccgaattttaacaaagttgagaaactctggaataggagacttggggttacaccttggaatgaatccaggctctattcctctctagctttgtaattttggacaagctgatttcatccctctctgtgaaatggaactaatacctcacagaactcttgaagattaaatgagataatatatgtaaagtggtaaatgatcaaaaaatgatgtttattataactgtatttattattgttgttattgctgacacagtggagtaagaagtttaaaaggctaggcagagggataaagtcacagtgaaaaatagaaaaacggggtgtctagggagccccctcaattagcacaaaaaagtatgaatccagtgatcttcaaaataagccagatcttgaaatccgtttgtagcaagcaagagacttttaactgttaaatggcaattattagtttagtgttttaaataacttatttgcatataataaaaagttacacagagttcttccactcttgcctactgtctgctcccagctccctgtaacacagataaccacgctgaaagatagacataataatgaaccggcgtcagtgtcgggagtaaatacccaagattcattgtctcacggccacggaaaactaagacacagacacacaaatactgaggttcagagtggaagtttaataagcaaaagaaagagaagagctctctctactgcagagagaggggtccaagagaaatggattgctggttccgcagtggaatgcaaggcgtttcatagatgagcttgaggaggcagtggctgatttacataggatgcaaaagattggttgaaccaggtgtgtcatttgcatagggcaccaaaaactgtttagggctaggtgtgtcatttgcgtagggcatgaaaaagctggccaccccacactcatcttttattatgcagctggttctccacctggccagcgccatgttacctgtttccttactgtacatgtggtggcaaagaaaagggaagagtggagcctccatgttaaacatacctggcccttacgtagcccttttctactggcatagctgccggtgttcacccgtgcaagcttccagcttgcttatctatgtctgcagcttgatttttcagactgctctttgttaaaaaaaaagaaattatttggggcctgctttttgttaaaagggaaattctgtggaggactcttatacccttactatctgcctaaataatttctatctcctgtatcaataacagtaataatcatgatgtttatttaccacttacaacaggacacacactgttctaaatgctttgtgaagattaacttgtttacaggctctgagcaaatgctgttattttgtccttttaacaaatgaggaagcacaagcacagagaggttaagtaatttgcccacagtcacacagctatgcagtagaatagggagtcaaatccacacagcccagcccctgaatccatggatttatctactgcaccatccttcaagtgtctctttatgcagatacgagcaaatctaaacatattttcttttcttcttttttttttccaaaaggtagcacactgctgccattgttctgcaatttggttttgttctgcacttaacacgacttattggagattgtcccacatcagaacataaagaggttcctcattcttgtttactgtactgtgtgattttgattaaagaaccctccctttatgatccaacctggttattatgggagcgagtgactaattgaataagcttatgtctgccagatagctcttgtaattgaagtgtgctatgaaggttcaacactggaaatgggagagtcaggggaaatgagggaagaaaacttattactccaaaaatgtttccaggtagtattaggtctcccacctgaaagaaatactcaagcaagagttgtcctgcgttcgggctgccctaaattaactccctctcagaaatctgttctcttcctatatgtgagctttgagcctaatgaggctgtacctaatgagtgtctctgcagcagccttgcaacaagaattggcaaaatggaagtgcgggtaccagtgtgcctgcccctccctcacctgcccctgacatgtcctgctggtcaccaggcaggacggcagctccatttagctgatcacctaaacagaggtggcccagggcctctgactgtggtgtttcttcagcacgaaacgctcttcactcattcacaaaacactgttgagcacctgctatgtgtctggcactgttgtagaagctgggggaactgcagtgaagtagtccaggtcctgccctcatagagtttacactctagcaggagacaacatagctctgtaatttgaggtcaggtgatgaatttaaaaattaaagcaggggccggcgtggtggcttacacctgtaatcccagcacctcgggaggccgaggtgggcagattacctgaggtcaggagttcgagaccaacctagccaacatgatgaaaccccatctctactaacaaaatacaaaaaaaattgcccggttatggtggcgtgcacgtgtaatcccagctactcctgaggctgaggcaggagtgggaaggaaaaagtggatataataggggtagtaactcatgtaggccctgtgggctgtggtcaggaccctggagttccttcccagcatatgggaaaaccactggatggctctgggcaaggaactaatctgactggatttatatatttttttttttttaaatacagggtctccgttgccgaggctggaatgcagtggcgcgatctcggctcactgcagcctctgcctcccaggctcaagtgatcctcccacctcagcctcccaagcagctgggactataggcgtgcaccaccacgcctggctaaaattatttatttatttgtttgtttgtttgtattttttgtggagaccaagtttctccctgtcgaactcctggactcaagtgatctgcccacactggccttggaaagtgttgggattacaggcacgagctaccgcacctggccttaccattttatttaaaagctcactttggagagaagccagttaggaggcaatggtggacaacaggtcagaagatgatgtaccttgagcgttccagggtcctggcctgagggagcaagcagcatgatgcccaatgaactagggttgttgtgtgcagagacaagagacccagggatagtggccagctccaccgggtgggagccatcgtgggtgccctgggtcctgccatgccctgtgatcctccgcaagcaggtctgagccgtgcaggggagagctgcaccaggactggggccgacaggccagcagggacaccctgaaggcttcagaaaccctggaacggagtttcacagggagccctgggagggctttaagtggtgatggtggaatctgatttttgttgttgttgttgttgagacagtcttgttctgtcacccaggctggagtgcaatggcatgatctcggcttactcaaacctccgcctcccggattcaagtgattcttctgcctcagcctcccgagtagcttgggattacaggcacaagccaccacgcccagctaatttttgtagagatggggtttcgccacgttggccaggctggtcttgaattccctacctcaggtgatctgcccgcctcagcctcccaaagtgctgggaatacagacgtgagccactgtgcccagcttgatttctctttttaaaggaacgctcaggctcacaggaatcttgggtgaacgttacccactctcctcttccattcccacatttctcttatccattggctttgttctgcccaatctttgccagtctgtcctcttggctcctcaagccacatggtaaaacatggcggccaccaactctcattttaaccaccttgacagaatgactctttttctcaatttcaattctcaaattcccagggaagagggctgattgacccagcctagggatcaggtgccccctggaccaatcagtggtggctgcaaggtcaaggggacaggatggcaaatcactttctaccaatatggtggctctcactgtagcctcaaagggagaatagggatgaaagggatttaatccccaggggaaagaaggtgccttaaaacatcacagcttaggtggaagcctaatctcttggactctcattcttgcagaatatatctataagcagtggacttttagtccctctccccttttttctggtgctttcctcctgatgccttctagacaatcatttgcaccttttctttgtctgtctccagttacatgttttaatcatcggggtttgcttcctcaaagttaagctatggatggagttttcccaaggccagctcttcttaggaggatgaattgaattcatcctcctaagaagagattgaattgatagtcactcacaaacacacatctgtggtctgggaagatgtgggtttaacaaaaagctattttggttagaaggaaaaattaatattgactgactcaaatccagaaagaggaagcagataccaagttcattttgaaaaataagagttcattttaggggcagactagctaagctcttttgcttagaaggagaaattaatattggcggactcaaatccagaaggaggaagcagatattaagttcattttgaaaaataggagttcaatttaggggcaggctaggtatcacccttttgagatatttaccaggagtgaggaccacatttcatattcagttgtaaggtacttttcataaccatggacagtgttttcttaaagtgtttctctttcttcccctattgtgttctttttatgtaaccagttaattttccaaattttattctgatagaaccagagtccttttattttttacataacatatctaattctgtttttctcttaaaggatgcttgctggttttgttttgttcatcactgaggatgagctaatgacagcttttaaaacatcccagcttgttttttacttggatatcatcatagagatccataccacagaagaaagaagtaggacttttatctctgaaaggattttagtgcataaactgtgacttccagcctgctagacttcatgctagtcttaggatctttgaatagccttaaattagctgcaggatccaggaagcttgctctgaaattcagttgacatggtaagaaccctactttaggccagatgtggtagctcacacctgtaatcccaatactttgggagggcgaggcgggtggatcacctgaggtcatgagttcaagaccagccttggcaacatggtgaaaacctgtctactaaaaatacaaaaattagctgggcgtggtggtgcacacctgtaatcacagctactcaggaggccgaggcatgagaatcacttgaacctgggaggcggaggttgcggtgagccgagatcacgccactgcactccagcctgagcgacagagagagactccatctcaaaaataaataaataaataaaaactctactttacctattcagtgttcttttcttttatcccattctggcattttctgaagggttgcagagagcactggttgaagcctatcctgaagctaccttggtagaggagttaattgcaccaggagacctaatttcagaaaggtcacagattatattccaccctccacaaaagtaacctggaagatgagtaagtcctgtcctaaattttagtaccaaaaacagtgtttgctcaaagaaaaaatagtctagtagagaaaagcacaccctttggggtcagaccaccaggaatcacatacaaactctgaacctgaattttcttatctacacgaaggcagcatggctgtgagaacatgcagtgattttataaaactcctggcccataggtggcaggtattaataggaaatagctacgtaaatatacttcttctggacttaggtactgtttttgcattggtcacctctgcttttgagtctcactcaagaaatctttgcccagaccaatgtcctggagagtttccccaacattttcttctagtattttcatagtttcaggtcttagctttaaatcttccatccattttgatttaatttttgtatatggcaagagttaggggtccagtttcattcttttgcatatggctatctagttttcccagcaccatttattgaagacattgtccttaccccaatgtatgctcttagcccctttgttgaaaatgagtttactgtaaatgcatagatttctttctggattttctctttttttttccattggtccgtgtgtcttgtttttatgcaagtcctatgctgttttggttattatagctttgtagtataatctgaactcaggtaatgtgatttctccagttttgttccttttgctcaggatggctttggttattctgggtcttttgtggtttcatataaattttagaattttttcttctatctctgaagaatgtcattggtattttgatagggattgcatggaatctgtagattgctttgagcagtatggagatttttaacaattttaattctttgaatccatggccaacttgcttggatttggacttgctgtgccccctcacaaccctgagctagttacttgcccaccccaagcctccgcagctcatccttaaagggggttacgatgatatctgcctccctctttgagttgctatcagaattcagtgaggacatgcagatgagagttttaacaatatctgggcccctagtaagcactgacaaatgttaattattattgttacttgtaaaatgggcatgattatcccccactacctacctctgaggcacctatcgaacaccagagattttgtgtgttcgaaagactgtgcacacattattttaaaaagtacagaggacactgtcaatagcagtcattaacagggtggcaataaggaaatcctattgctgcctgaatggtgtgtccttgaacagtgcagaaactccctttgctgatacatctccaaggggcagggggtggggatacatcacaggaagtacctgctgccactgcaactcccatctaattttgcgacagtcacgaaatgcgtcacctactgcatgcaactgactgcgtcacatgagaggaagttggttttctgcaaagggtaacaactcaccggatcaggtcacacgggcgggtggacgcagagctccgactagccgcaagtccagcgctcttttgtgctgcttctttgtggaaggaaatgtgaagaaaacccagcgtcaccctgtaaaccagacaaaatacaaaacagtggagaagcccagagaaggcaaaacagattccggatatttctcttttaaaagtaaaatggcatcatggaagaaatttggccttccgaaagtggaggataaagtcatgttcaaggggaagaacagcaatacagcatctgcggcttagacatacagagctcgtctgtaatttggagtaagataggagtgggggcggagagggggaaggccatgccctttcagagattctgagaaactccaaccataaaagtccatgacaactcaagtgcagtacccgtgaccccatgtttgtcaggtaacaagctgggttttgacttttattttgctgcttctaactctggctgggcgccatgggagaagggcgggcagatcactctattgaatactccaggggacagtgttgcagactgggacccacccttcactagctgggtgacctgggacaatccccgtctccccatggacctcagtttccgtatctgtaaaatgaagtggatacaattctattcattcatttatataacaaatatttattcagcaacttatatgttgggcattgttctccctattggggattcagtgattttcagaacggagaaatgtctccctcctggagctcacgttggcatagatggctggcaagacagcttcccaccctcattggaaatgtgtccctctgcccgctccatggtgcctcatgccccaccacactgcctacctgctagacttttggcaaactggaccaccagttgtctggagattggaaagagcctacttttttgttgtaatccttctgttcctttttcccccttttaatgtaaatgttattaaaacataacatccacatagaaagtgcacatactgataaattttcaccaacagaaacacacatgtaaccagcacccacaccaagaaacaaaatatgactcacactgaagaaagaccccatgtccctctggtctctgatctccaccgtagggaaaaccatctccagatttctgatcctaggtattagttttgttctttttaactttgtctttgtatatacccttttgtatgtcagttctttcactcattgttatatttgtgaggtttattcatgttgcttcacattgtggtggtttgtttattctcgtatagtatttcattagacgaacgttcaacaatgtgtgcatttgactgtgaatggacgtacagattattttctgctggaggccatcgctgaatggtattgctgtgacgtgtggacctatcttagtgaacgtgtttgcttttcccaggggagttgctgtggcataggttatgtatacattccatttcagtacattctgctggttttccacaatgggtgtacaaagtaggttcccaccagcaatgtttgataatccagggagctgaacattttgcatcttttacgctgtagccattctggtaagtgtgtactggtatcacatggtgattttaatttgcatttttctggcatctaataaaatttgccaggggaccctgttccacttaaacatgacaattaaacagagccgtctgtccacgccaggtcttttcttcaaggatactgcagttttcttaggcatcccccgctttcacactagtagtaaaatgaagagacgttactatacacacttcttccacagcccctgactctggaactttatatttcaccagtaagaagaagaaaaatgtcaccatgcgatccatcaagaccacccgggaccgagtgcctacatatcagtacaacatgaattttgaaaagctgggcaaatgcatcataataaacaacaagaactttgataaagtgacaggtgggtgtgtgggcatgggctcatctttccggttccctttcatcttctcctatttgtatcagacatttatgggagaaatgctgcacctacctactgtggcagacagcccctctgaaggcaaggttcctgtattcaggggaaagggttatgcggaaatcaagaatgttcagtctaaggccccaccacgtgtattagctgatgcggggctttgaccaaagggctaagaatccaggggaaccttggctttgatgggagctgaatgttaccaggaggctcacctgttgcgggcaggtggcactgttagcctcccctttgagtttgcttcagttcatttaaattgtggccttggaaggcattgtatatacttggagtgtttctgctgcagctggcaccagtacatttagcacccggcccactggcgcccgcatgtagtattcagccaggggatgctcacctgtggattcattgcttgattcccacaggtatgggcgttcgaaacggaacagacaaagatgccgaggcgctcttcaagtgcttccgaagcctgggttttgacgtgattgtctataatgactgctcttgtgccaagatgcaagatctgcttaaaaaaggtgagtgctgccaggagtggtggctcatgcctgcaatcccagaactttgggaggccaaggtgggaggatcacttgaacccaggagtgcaagactagcctgggcaaaatggcaacaccctatcttgaaatttttttttttttttaagtagccaggcatgatggcatgtgcctgtagtcccagctacttgagaggctgaggtggaaggattgcttgagcctaggaggttaagggtgcagtgagccatgataacaccattgcactccagcctgggtgacagagtgaggccctgtcacaaaaaaagaaaagttgagcccttaccgcccctccatctatcttcttcctgtacccaagggaggcgatccgcccaccatggccaggcccatctcagaaggatgcctgtgcagggcagaggaatttcagtgtgagaaacctccctccctcttgaccagtccatacctgtcctggagtaggcaggtttccttgaggagccttcaatctctttgtaaaatgatgaaatcagcttaaagtccagcaaaagaaatagattatttgtatacagaatggtcacaatttcaaaagactcattcctgggaagtaacaaatctgtgtcatcctttctagaatgaagtgtaagcgtaaacttttcccttgtggcagatagagaataataattccatatactttagaactatgttattttttatatagcatgttcacaaaattatttcattagatctttaacagaagccctgcaatgttgggcaacagaatattatgctcattttataaatataggggtgggccacgtgtggtgtctcacacctgtaatcccagcagtttgggaggccaaggcaggaggattgcttgaggccaggagttcgagaccagcctggccaacatgatgaaaccccgtctctacttaaaaatacaaaaattagctaagtgtggcgacacacacctgtaatcacagctactcgggaggctgaggcatgagaatcacttgaacccgggaacccaggaggcagaggttgcagtgagccaagatggcaccactgcactgcagcctgggtgacagagcaggactctgtctcaaaaaaaaataataataataaaataaaaaataaaataaaagaaggggtggagcttcagagaggaagaaagatacactgaagggtgcagttagtaggggcagaaccgaaacccacgctctggtcttctaactccaggacaaatgcgtttcctattacacgaccctctctaatggatgccacctaaggtattctggcatttagggcaagtgtttgaaagtaacatcctatcaattcactagacacagacccacaggaagtagataggaacacaatctaaatcactgctatttttcttaacctcacagctaaaacaaaaaaagtccccaccatctttttttttttttaaaactaggcatttttcctaatttcctccaacttgactcttacaagctgaccttttgtaccctagtaggttatgtcctagaccagactagaaatcaggagtctgagatctgggtctggcccaagttctaacaggcaacccaggcaaggcaaccacatcatcctgatttttttgctttcctgaaaggcagattatgataccagctcctgctgtttcttggggatggagtgaggaagcctgtgagccaagaggaattttgtgagcgtgcttcgagaagtataatggcccagataggcatatgaacttgtcccaattgtagtttctgtttggtttttgtttgtttgttttgttttgttttgtttgagacggagtctcactctgtcgcccaggcttgagtgcagtggtgcaatctcggctcactgcaacctccacctcccgggttcaagcaattctcctgcctcagcctcccaggtagctggcattacagatgcgtgccaccatgcctggctaattttttttttttttttttagtagagatggggtattaccatgctggccaggctggtctcaaactcatgacctcatgatccgcctgccttggcctcccaaagtgctgggattacaggcgtgagccactgcgcccggccgtttctgttcttttgaaaggtgattcattctgcccaagtccagagcatgtcacaatcagagaattcttgcttattgtcctatcaaactagtaaagcacttattttttctgactttacatgcagtcagttccagtgaagacaaaactcccattttctaactgtcctaatttgtgtactcttaaaataagctaagaactccagctttcatcaccatcaccttgtacctctactgtcaaaactaatacaagaatcactggggagataatgcaaagtgtcttggtaattcgaatgggagaggccactcttactctgcctggaactggtgaggtagctggactttgcagtgtcctgggcttgaaaaacggccccaaggctccaacgtgttctaccacctttggggaaggttatgagacctctccgagattccatttttttaaatcagtgaaataaagataaatgaggcctacttccagtcttgtaggaattaaaaataactcatgtaaagtacctagatcagtgtctgcacatagtatttgctcaagaaattctaaatattattccttcccccctcattaatcatagagaagaagaaaggatatgtgtattagctagttataggttggtgcaaaagtaattgcggtttttggcattaaaagtaatggttagttcacctatagctggttagttagtatcatagaacctttggtgagttctagctgggccaactagctacatggtttatgattcctctcctcagtatcctaaatggacagccaagctagtatttttatttatttttctttaattttgtttaattgtggtaaaatacacataacgtaaaattaccatcataaccatttttaaatgtatagatcagaatgacttcacatggttgtgtcaccatcaccaccatccatctcaggctttctttcatcttccgtaactgaaactttatctccattaaacactaactggctatttccccttccctccagcccctggcaaccaccgttctatattctgtgatcttgactactcagggtacctcctgaaagtggaatcatgcgatgcttgccctttagtgactggcttattgcacttagcgtaatattttattctctttaacaaacacttgcatgatgcttattatgtggcgtgttttacaaatattaactcatttaatgagttaatattgatcttcaatgtacagataaggaaatcaaggcacaaaatggttcagtaacattcctgatgtcacagaactagccaacagcagggccacacacatcagcccccatacactgtacctatccctctctcttaacgtcttagataagtctgatcctttgaaaggagcccagtccccagctcctcccctcccctcccttgtaaccctctaatagtcagaggcagctgccaggctgcctctgaaaatgctgcatctgaggctccccagaacttagaccttaattcttcaatgttcgtattatttgcttgcagcttctgaagaggaccatacaaatgccgcctgcttcgcctgcatcctcttaagccatggagaagaaaatgtaatttatgggaaagatggtgtcacaccaataaaggatttgacagcccactttaggggggatagatgcaaaacccttttagagaaacccaaactcttcttcattcaggtaatctcttttcaatgccaatacacttgaaaatgggaaagattgcagagtgacggggatggcatcatttttacaaatccaaatgctgcttccatattcaaattagggttttatttttctgggaaagattacagagtgacggggatggcatcatttttacaaatccaaatgctgcttccatattcaaattagggttttatttttctatctctgaatggttagcatatgtgtttccactggatcacaaattatgaaggtttctttttttttttctttgagatggaatcttgctctgtcacccaggctggagtgcagcggcgtgatctcggaagactgcaacctccacctcccaggttcaagcaatactcctgcctcagcctcctgagtagctgggattacaggcacgcaccaccacgcctggctaatttttgtatttttagaagagaggggtttcgccatgttggccaggctggtctcaaactcctggcgtcaagtgatccacccacctcaggctcccaaagtgctgggattacaggtgtgagcctccacacccagccacaaattatgaaggtttctttaagacattgcaatacttttatttgctttgcttagtcatttgaaacacattcattcatttatcttttcatcaaattatcattgagctcctaagtatgccaggcacagttctaggtatcaggacacagcagtgaacagcacgtacatttctgttcccaactgcatagaatgatgtctgctttgatatttaggcttgccgagggaccgagcttgatgatggcatccaggccgactcggggcccatcaatgacacagatgctaatcctcgatacaagatcccagtggaagctgacttcctcttcgcctattccacggttccaggtatcatgtccattgtctgccaagcatacttcagtccattccatcatcaaaacacagatttggggactgtattcgtttcctcttgctgcagtaatacattactacaaacacagtggcttaaaatacacaaatgtattatcttgcagttctggaggtcagaattccaaaataggttggcagggctacgttccttttggaggctcaagggaaaatccatttcccagcctttacgtggcatgttagaaccacctgcattccttggctgtggccccttccttcatcttcaaagccagcaactttgcatctctctgacccttctgtcgtttaccgtgctctctttctgaccacagctgagaaaggacacctgtgattagatggaacccacctggatgctccaggatcatctccccatgtcagtccgatacccttaaccacatctgcaaagtcctttcttccacataaggtttcatgttcataggttccagggttagggcgtggacatctttgggcaccattattctgcctaccacagaaatgcattcacttttctctccaggaaagctgaattctctcatttgttattattattattgttttagtagttataaggacaaacatttctgtagtactttgcaatatagagtatctttcatgtgttttttctcatatacaataataccgtaagtatttaggaaaggtgttattcctgtcctgattttacaggtaaaataaaagaatttttagtttggatgaatctaagtgatatgcctaaggtcaggtagagatttcagtgcacagtagagctgtgagtcagccaaggttcctttacacggcagcctgtacacagataccagaaaacgccagcaatgggcaagcctactcactatttaccaagcactacatttgactgaatctgttcaatgaaagtccttcctttgttttgggtacaaaccagcactaagttagaattttcccagctgtaatagtagttgtgtcaagtatttggcacaagggtactggttacagtaaataggttgatgtgtttggaaaaccagctctggcaggatctacagatgagattttgtgagagcgataacttcacaagttttaaggatggcataagatcgaaaataatttggtctttctgctcttgagagggaggtggtgtaatgggggcatatgtctgtgtaaacaaacccagtggtagagttgtagttgctctgagcaaggaggcagttgagaaaagctatgttaaaaaggagctgctgggccgggcacggtggctcacatctgtaatcccagcactttgggaggccagggcaggtggatctcaaggtcaggagattgagaccatcctggctaacacagtgaaaccccatctctactaaaaatacaaaaaaaaaaaaaaatagctgggcatggtggtgggcgcctgtaatcccagctactcgggaggctgaggcaggagaatggcgtgaacttgggaggcggagcttgcagtgagccaagatcgcaccactgcactccagcctgggcaacagagcaagactccgtctcaaaaaaaaaaaaaaaaaaaaaggagctgctataactgagcctaaaatttcaaacaacataggtaaaagaaggatggcttgtcagacggagtgctgaggggctggatagcccagtgcatttggtaaaactcggggctggatctcagggtatatcagtcttcttgggctgctatagcaaaataccttagacaaggtggcttaaacaacagacatttatttctctaagttatggatgctgggaagtccaagatcaaggtgccggctaagttgctttctggtgagggctccctttctagctcataaatggtcacgttcttgctatagcctcatatggcagagattgagagcaagactgagtgaggtctgttgtgtctcttcttataaggacaccaatcctcttggatcagagccctaccctagtgacctcattggaccttaattacctccataaagaccctgcctctaaacacagtcacattatggggtgcggcttcaataaatgaattttgggaagacatagttcagtccatagcaagggatatgacagggcatggccagggtcaaaccaggacaggtaggcaggtggccctgtcatggtggaacctgtgtgctatgtcaagcagcctgaactttactcagataaagtggcgcaagggaacggttttaggttagggagttataggatgagatttgccctcccgggtcatcaggctctcctggccctgcccctcagacaattgggcattcagcttccttgtgcctctagatttcttcagcaaggtccaactctactcctatgtatcccagcagcaggaacacatctcagaattccttgaggttctctgcaaattccttctctagtaggcttggattaggaagtagcactgacccctaaaggatagtgaggagttccagagttatggaatagacctccagcatttcctttggaagtctgcacatgcagatctgtctcacacccacgtatctgatatttatcaggtgggtacgtccatcaaaactgacacaagagagtaccctggcaacatccaccaatgctggcccttagtgatgctgtctgtcatgggatttccatgctgaaatactcaaagcattttctagcatcttcatgccagccgttaaatctcagatgtttgctctctgagcacaccagcataattctcattaatgacttgtgtgcagagtagagtgaaatagtttctgaaaagcaggtgtgaaagtgccatatactcattctcattggtgagtggagcagctgtcagaattagctgatttggtcgtctcctttctttcctgttgaaggctattactcgtggaggagcccaggaagaggctcctggtttgtgcaagccctctgctccatcctggaggagcacggaaaagacctggaaatcatgcagatcctcaccagggtgaatgacagagttgccaggcactttgagtctcagtctgatgacccacacttccatgagaagaagcagatcccctgtgtggtctccatgctcaccaaggaactctacttcagtcaatagccatatcaggggtacattctagctgagaagcaatgggtcactcattaatgaatcacatttttttatgctcttgaaatattcagaaattctccaggattttaatttcaggaaaatgtattgattcaacagggaagaaactttctggtgctgtcttttgttctctgaattttcagagactttttttataatgttattcatttggtgactgtgtaactttctcttaagattaattttctctttgtatgtctgttaccttgttaatagacttaatacatgcaacagaagtgacttctggagaaagctcatggctgtgtccactgcaattggtggtaacagtggtagagtcatgtttgcacttggcaaaaagaatcccaatgtttgacaaaacacagccaaggggatatttactgctctttattgcagaatgtgggtattgagtgtgatttgaatgatttttcattggcttagggcagattttcatgcaaaagttctcatatgagttagaggagaaaaagcttaatgattctgatatgtatccatcaggatccagtctggaaaacagaaaccattctaggtgtttcaacagagggagtttaatacaggaaattgacttacatagatgataaaagagaagccaaacagcaagaagctgttaccacacccagggctatgaggataatgggaagaggtttggtttcctgtgtccagtagtgggatcatccagaggagctggaaccatggtgggggctgcctagtgggagttaggaccaccaatggattgtggaaaatggagccatgacaagaacaaagccactgactgagatggagtgagctgagacagataagagaataccttggtctcacctatcctgccctcacatcttccaccagcaccttactgcccaggcctatctggaagccacctcaccaaggaccttggaagagcaagggacagtgaggcaggagaagaacaagaaatggatgtaagcctggcccataatgtgaacataagtaatcactaatgctcaacaatttatccattcaatcatttattcattgggttgtcagatagtctatgtatgtgtaaaacaatctgttttggctttatgtgcaaaatctgttatagctttaaaatatatctggaactttttagattattccaagccttattttgagtaaatatttgttacttttagttctataagtgaggaagagtttatggcaaagatttttggcactttgttttcaagatggtgttatcttttgaattcttgataaatgactgtttttttctgcctaatagtaactggttaaaaaacaaatgttcatatttattgattaaaaatgtggttgcttaattcctaaccag

SEQ ID NO: 32 - DNA, 4240 bp, Homo sapiens
gacgatacgccgggcgcaggcgcagaagccgcgcccgtccgcggcgccgccagccagggcggaaacggctgcggcttcgctagggacgcatgcgcgggtcccttagttttcgcgagataacggtcgaaaacgcgctcttgtcgatttcctgtagtgaatcaggcaccggagtgcaggttcgggggtggaatccttgggccgctgggcaagcggcgagacctggccagggccagcgagccgaggacagagggcgcacggagggccgggccgcagccccggccgcttgcagaccccgccatggacccgttcctggtgctgctgcactcggtgtcgtccagcctgtcgagcagcgagctgaccgagctcaagttcctatgcctcgggcgcgtgggcaagcgcaagctggagcgcgtgcagagcggcctagacctcttctccatgctgctggagcagaacgacctggagcccgggcacaccgagctcctgcgcgagctgctcgcctccctgcggcgccacgacctgctgcggcgcgtcgacgacttcgaggcgggggcggcggccggggccgcgcctggggaagaaggtgggcgcggggccgggccgggggagccagggcctggtcgcccggctgtaggtgctgcgaggctcctccggttggcctccaggcgcctcccctttgccgggtttgatttgcgtgggttttctccgtacagccctggttttgcagatgggagagccagaaacgcagaaaagttaacttattcgaggttgcagggcgtggacacgcacagtcctttttcctccacccacttctgcccgggtaaattagaaaactcactgaagaaaagatgagtcagagaaggtgtgggggaggggcagaggttgggtgagcctgcctcgcatcatttcctttctgtctcggaatatgcttttcacggctgtctgagagtaatactagcattcagtaactcctacccaggggcttacagtgtgccgcttacccttgtaactgccaaatacaattttcgcagtagccctgtggcttagatactgttagctatcactgttcccattttacagaggacaggactgtggctcacaggttaagtggctttgtcgaaatgcgcagccgataactgacggagctaggcttgagccaagcagtccggcctccggatgggtagtgttagccactacactgcctctctggtcaagttcattgtggagtggcttcctgtcctgctctcggtcactccctctccaccctcgcctgtggattgcagcagcttccaggataaaaaagaaaccctgagtacagcagagtttctcagccctaccccccttgttctcagagtcgggagaggcttgggagtgctctggggacgcctctcagaggcttcaagctgtagcttggaatcagccattcagtcaccaatcagatagggcctaaatgtgtcaccatgggtttcactctgtaaagactggtgcctgttggggacaggatggacagaacagctctctgcctgagagcagtcaagtccagattttaaaaaaaatcagtactgaacaaacaaaacaggacgtagaaaaatcgggttttatggatatttaatgtctggaaaaacactgataaattgcattttaaaggcggtctacgaaacatagctgacatttgagatgtatgtgtgcttggttttatttatatcgtcatgtagttactgtgtgctgggaaaagtacaccagaaggtgagcggtgggtatggacaggttggtagcgggcgactctgccttcctccccagaagttcagcatagcggttaagggtcgactctggcaccacactcttagggtttcagaacatggctctgccatcgtctagctacacgatctcaggaatgtccattagcttccctgtgcctcaatttcctcatctgtacagtcatggtaacacagtgcccagcccacagggctgtcagagctgcgggagctggtacacctgccaacggtgtctcagaattgccagtagtccaagcagcaccctgtcctgcctctcctttcctctcttcacattccagaagcggccttttatggtcttgtgaccagctccctgatctcagtggtgacgtcagcagatgaggagtatggtagccagggactgaagactggtggtcactcggggcagctttctaaataacaattggagtgcctactagtttcctgtgattgccataacaaatgatcacaaatctggtggcctgaagcaatagaaatctaccccctcaatctggaggccagaaatctgaataagcagggtgccacagaccggcacaccctcggaatgctgttggggaggctccttccgggtctcgtccgctttgtggtggctccaggcattctttgacttgtggccgcttcactccaggctcacacggccttccctgtgtgtctcctgcaaggatacctatcattggtgcatccaggtcatccaggatgatctcctctcaagaccctcagcttacctttgcaaagatgctttttccaaagaacattcatggtttcagcaatttcacgtgaacataccttggggtgacatcgttcagcctgctgtagggcaggatgtgggatcaaccctattttcttccctcccacaactccccagcccctccctcagtgtctcctgctctaagtaggtagctccactacaacttcctttggcacttgagtcttcagtgggccacgcctcctaggacagtattagagagcagggggtttggctgaggtggaatcaggccactcttgggcatttggtgcagcccctttgctgccaggcgactctagcctctacagaggacctcgtgtaggcacctctgtccactcagcacttggcgtctgtgctgaaaagccctagggaggattgtggggtcgcttgtctccaaacctatggtaaaccgttctgttctttccttcccagacctgtgtgcagcatttaacgtcatatgtgataatgtggggaaagattggagaaggctggctcgtcagctcaaagtctcagacaccaagatcgacagcatcgaggacagatacccccgcaacctgacagagcgtgtgcgggagtcactgagaatctggaagaacacagagaaggagaacgcaacagtggcccacctggtgggggctctcaggtcctgccagatgaacctggtggctgacctggtacaagaggttcagcaggcccgtgacctccagaacaggagtggggccatgtccccgatgtcatggaactcagacgcatctacctccgaagcgtcctgatgggccgctgctttgcgctggtggaccacaggcatctacacagcctggactttggttctctccaggaaggtagcccagcactgtgaagacccagcaggaagccaggctgagtgagccacagaccacctgcttctgaactcaagctgcgtttattaatgcctctcccgcaccaggccgggcttgggccctgcacagatatttccatttcttcctcactatgacactgagcaagatcttgtctccactaaatgagctcctgcgggagtagttggaaagttggaaccgtgtccagcacagaaggaatctgtgcagatgagcagtcacactgttactccacagcggaggagaccagctcagaggcccaggaatcggagcgaagcagagaggtggagaactgggatttgaacccccgccatccttcaccagagcccatgctcaaccactgtggcgttctgctgcccctgcagttggcagaaaggatgttttgtcccatttccttggaggccaccgggacagacctggacactagggtcaggcggggtgctgtggtggggagaggcatggctggggtgggggtggggagacctggttggccgtggtccagctcttggcccctgtgtgagttgagtctcctctctgagactgctaagtaggggcagtgatggttgccaggacgaattgagataatatctgtgaggtgctgatgagtgattgacacacagcactctctaaatcttccttgtgaggattatgggtcctgcaattctacagtttcttactgttttgtatcaaaatcactatctttctgataacagaattgccaaggcagcgggatctcgtatctttaaaaagcagtcctcttattcctaaggtaatcctattaaaacacagctttacaacttccatactacaaaaaattttctattcct

SEQ ID NO: 33 - DNA, 25255 bp, Homo sapiens
cctacccgcgcgcaggccaagttgctgaatcaatggagccctccccaacccgggcgttccccagcgaggcttccttcccatcctcctgaccaccggggcttttcgtgagctcgtctctgatctcgcgcaagagtgacacacaggtgttcaaagacgcttctggggagtgagggaagcggtttacgagtgacttggctggagcctcaggggcgggcactggcacggaacacaccctgaggccagccctggctgcccaggcggagctgcctcttctcccgcgggttggtggacccgctcagtacggagttggggaagctctttcacttcggaggattgctcaacaaccatgctgggcatctggaccctcctacctctggtgagccctctcctgcccgggtggaggcttaccccgtcttagtcccggggataggcaaagtggggcgggcgcgggacgcgtgcgggattgcggcggcagcggcgcacgcgggcacctgggagcggcgggctgctgcgggaggcgttggagactggctcccgggggctgttaggaccttccctcaggcccgggtgctcagaacgctggaggacttgcttttcttgggccttgatgcgaagtgctgaccccgctgggcaggcggggcagctccggcgctcctcggagaccactgcgctccacgttgaggtgggcgtggggtgcggacaggaattgaagcggaagtctgggaagctttagggtcgctggagggggaccccggttggagagaggagcggaactcctggacaagccctgacaagccaagccaaaggtccgctccggcgcgggtgggtgagtgcgcgccgccccgcgggggcggggagagagcctgcagccttcagaacagatattgctcattttctggcagttctcagacgtaggaaataagtcagcaccgaagcagtggttaagccggagggctcggaagaacggcaccttttctttctcgaaaaagttatatgggggctgaatgagcttctggaggcttgtttaccgttttttattgtcacacagaaaaagaaactgccttgtctcccttccgggaattctctctttaagactgtaagtcgctgcctgagtggtttcattttgttttgtttttctgcccttctctttcttcttttgccctttcttagcttgcactcccatggtgatttctgcttggtctcctgctggggttggtggtactcgttcccaccgcacagaacccggcgcctattattggccaagaaacttgagcagcctgttttgaaaagtccctcgctcagaaatgccagcttgcagatggctaatcaaagagacgtggatccaggaggctcatttgagtaccggagcctctgagagtccatggatttttattttattgggccccaacaaagtgccaggcatagcgagagaagtgtttacaaatgtgatctccgcggattctcacgagagccatgtagtggggaagataaccacatccccattttacagatggcgaaatgaggttcagagagcttcagtaattcagccaagatcacacagctagtaaatgggagatatgggattgaactcagatctaattccaaaactcaggctgttcgctgattgcatctgatatccagattacaccaagaggctgagatgtctgggtccattttatgattagaaaaaaaaatcctgttcctttcagaaatagtgtgcactatttgggattctttagaaacttccttggagaaaattaatgattcaagattgagaaaacatttatacaacctcaggccacactcttctctctcttgttattaaccattgcaccactgcaatgttggctgctttgaaaatctcatagtttttggacagcagtattagtaaagtgtaagaaaattgtcaaagcttggagctatgcttgttgaacttttgtaccaatagcacctttaccagaggctgcgtgtttaaagcccgaagaaaactttgcttttctgaaagaatacacacacacacgcatatgtaaatattcatacatttatgtatatatacatattataatacctataagttaggtataacttatatttgtatatgatatatggcctaggaaattaaggcttattaaataaaatttataaatgcagatgagtcaaatacaaagatcagacataactctatcacctaagtaatcattgtttacgttttgcagtttatcttccatttctcccctctaatatgactcttttaaatttagttacacagaaattggttttgcgctcacgacatgcctaacatcaggcctttatccttaaagaagtttcaacactcttgtgtcacctcatgtgtctacagaaaatgtttgcttttatgccttcacggttatgttttcttagtagtagcaataaataaaatagatgcaaagtgctaattacttggaatacagaagcaaattttaattctattaatgggctggacatagatgggtggggagctgttttctgcttttcccctcttcccctagtcctctgactctggtgataactatagtcaacaagtatccccatccttaaccccttttgcttctctttctctttccttctctcaaccttcctggtgttagttttctctttcctatttctgagtgtttttactccgacacttacaataaaaaagtttgaaatcccaaaaagttgacaaatttctaaaggagacagaaaaagagtcaaacttactttacaaattaatttgagaaatagctgtgggttgcattttttttttttattgtgcatgaccctgttattggccaagaaacttgagcagcctgttttggaaagtccctcgctcagaaatgccagcttgctaattgaagggatgtggatccatgaggctcatttgaattccgaagcctctaagagtccatggatttttattttattgggccccaacaggttttgtcttgcattatttaggacattggccaggcaatcactggacagccagtttgctctcctttacattttgtagaatggttatcttatggtcaaaggaaagggagagggcctttggaaaataaagctgtgtatttacaagcagtcatacagaatagttttgtggggaaaataaagaacagttatttaatttgtaatttaatcatttttcttaaaccaacccaaagagcataaaatggaatatttatttatttttgtagcttaatttgtaatttaataatttttcttaagccaacctaacgaacatattgggctgtttattttcatttttaatgggccatatttacatcacaaaggacttgagaagtcttacaaatacaataaaatgataaaatatgaattaagacattagcaaccaggatggaaaaacacaaatttgtaaatgatggccaggtttgcaagcaaaaattaaattgataaatggcagcacccccactaccagctatagttagactgatgaaaaatcctctaatgttcatgcctgaaatacagttaccacccttagcagcaaattagaggcaaagaagttctggaatttggacgttgtctctgagtaagctctttgagacactggacaagtaatttccttctgaatactcttatactgacacataggagaagtgtcagtgtttcaaaggaatctctttgaaggctactacattgctttaggggtgccagattaccagagtaaactgccagtttgagagaataactgtttcttaagagatggtctgaaacctaagtaaggaaatccccccacttgaaagcccctaggaagttaattgcttttggcaaattatcttgggccccaaaagtcccttgatgagcacatgttttgtaataggtactaaagactatttacttatgatgaaaaataaaataacacaatttaaaacttgaaattgataaaaagcaacttgaaaccaaatttaggacagtgaacccatccctttcttatttttaaataggtaaatatagaaaaaatgaccacatgatgtgaaacaaaaagcaaatatttaaaaactacatttatactttatctcaccacactaatgtaaagaattttgattttacttataaattcttagccttgtctacacatatacataattgcatgtttaatttgagctatatatagtctgttttttgttcctttgcatgttacacaaacctttttctatttctacataatttttatctcatattttttattggatacattatagagagagcatttattaaatgagctgggattactataatttttattatttattttttaatttattacttatttttataatttactattgaaaaaaagcatttcttaaatgtactgggatacatatatatatatgactttttcttgttactaaaaaattactcatagaacttacatattaaaattttaggacttgtgatgaaaaataataaaataattcaaaacgataaaaagcaacataattttatatgttgtaccttgtacttccttataaggtacaacactacaatagccttagtgtgtagttttctttttgctatgtatgtatatatatattcataaaagtggaaaaataacatttaataaatcctctttattttctggaaaatccttgctttaaaaaaagtctttagctttttatatagttctacttctaacaccaattaaatatcttcaattcagtctcaagcaggaacaaatcttcagtccacttgcctacctttactgtctttgaagtgacagtgtgagtagtaaagcccaaatcagagagaaattgacttttgtaagattggtaacttcaccttccccggaaggaaatgaggtggttcttccctttgatcacaactgctttcttgatttgaaataaactgttgtacagcccagtcaccccatctttagacatttagaaatggcaatcatagttatataggacaactagcctgagtcccactaagtagaaatgatagtgaatttagtataagattatacctttaggctgggcaggtgactcacacctgtcacccagcacttcaggaggccaaggtgggtggatcatggatcacttgagattaggagtttgagaccagcctggccaacatggcaaaaacccaactctactgaaaatacacaaattagctgggtgtggtggcgtgcctgttatctcagctactcgggaggtcgcggcaggagaatcactggaacctgggaggtggaagttgcagtgagccaagatcatgccactgcactccaggctgggcgacagagtgagactccgtctacaaagaaaacaaagaaacaaaaaatcatacctttagagcaaggccagccttgtgaattagcaaatctgactacaaattcaatcagcagatgtactcagcccagcaaagtgagcaagcttactataggttgtgttaaggcatggactgggataaactggcaaaattagagtaaatttgacaatttgacattggattcattaatgatagcctgtccttcaatgaagtcaggcagcattgtgtttctattcacctctgtgttttgtgaggctataaaaatataagatatgagaaatgtgaatactttttatttgtgagggcagatatcttgaaaaagagagcgagaggaagtcagagtatgcgggtgaagactcttgtttttttgctgaggatttagctttggtttttagccattctcacagagatcattggtcctaattaactggttgttgttgttttttttcatgtgaatgtctgtaaggtttcaggcttgattttaaaaattgggcctatactcacagaaagacaaatactgcatgatctcgtttatatgtggaatctaaaagttttgaatccataaaagtagagagtagaatagtggttaccagaggctagttgggggcaaagttgggggatttagggagatattggtcaaaggatacaaaatttcagttaggaggaataagttcaagagatctagtgtacaacttgatgtctatagctaataacaatgtattgtatacttgaaaattactaagagtagattttaagtgttctcgccacacacacacaaaagaaaatgataagtatgtgaaggaatgcccaatgtaattagctcgatttagctaattatcttccaaaatatgtacataattatcttccaaaatatgtacataattcaagacatcatgttatataccataaatatatataatttttttatttgtcgaataaaaataatacaaaaaaaccctgggcctatactgcccacaggtagtggccacaggcagagctggtcccaagcccctccctctctctgtagtcccttatcccaggttgctttattcttgtatgacccacgtggcccctctgggcttgtaagggctctggggctgtattttaggactctatagcccttacattacccatttcctctaccaaaggtcatttctcttatcttcaagcttatttttggaagggtcattatttcttcatgagaagtcaaattctgatttgcaagtgctgaacacagatgccattagtctataaaactcttatattctcacatgtaaatgtagtaacctgctaacctcagattctgcttcctctaacctagttgccctgcaactgtgatgaacctcaaaatcaccaagggtacttccccattctcagagatcctgattccttaggtctatgtaggggccttagcactttttattaaataatgcatcactacaggattctgatgtctgtcggggtcttgagaactatttttctgactctagcactaaactcaaaatgtaatttcagatggaatttcctaggctcattcattttattttatttatggcttggccagtcatggatctaatcagtaacttgcaactgttgcttcaactacctctgtcctggactttccagagattggctttaagaaagaaagaggacatccctgggataagattaccatgtgtatttttatgtacagattttgaaaaacatacaaatgaatgggatctttgcttatctcttccatgtagaaaaatttattttacttctatttcaggttttcaataatgtagtaggacaagatgacatcactatatccctgttttttacacagatatattagagatgcattatcttattggaaattttaaactattcaataataaactattagtcttttagaatttctttttcctcaagtgttgataagtaactgaaagtctacaagcagacaagcagaattagtcggtggaacttcatttcttgctccatttttgtcctcagcagtagagggtggtgagatttcaacccagcctagcaggaccaataagtctggaaagaagtagctctagttcatattggcacctgctaattctagttctgaagaccatgggaaatctcttgcctatttagctcagtgatcatccaagatgggaaattcttgggctcagctgtgagggatcccaagtttatatgtaacactaatgtctcacaaatcaagaatccaagagaatcaagagactatagttcattccttatattaaattcttaggactgccaactgggtggctacagttttgggggctagaagtctgatatcaaggtgccaactggactggttccttctgaggaccacgagggcaggatctgttcaggcttgtagatggccttcttttccatgtgtcttcacattatcttcctctgtttgtatgtgtgtccaaatttcctcttctttttttttaatttagaaatttatactgtctacaagctttatatagctttagttaaaaaaaagcaaaaaaaaaaaaaaatcaaaacaaaaacagtgaagccaagacactcttccaaagtctggacccttccggccttccaaatacaagagctctggaagttgtatataccaaatttcctcttcttaaaatgtcaccagtcacattggattaaggcttaccctattaacaccattttaacttaatcacctctgtaaagaccctatctcctgatacagtcacattcggatgctcaggaagttagggtatcagtatcactatatgaatttgggagttgggggaggacacagtttagcccatgacagtcctgaatctcctttgctagatgcatgactgtgggccagtcacttcaccagttgggatactgccatctctatcagaaaaggggtttgggctaggtcatctataaagtcctttctgctctaaattgtaaatataatgagataccaacatttagtttaattgtttaaaattttagaagctaactggatgctttgctggtgtcaacactcccctttacaaaaaaaaattcggccgggcatggtggctcacgcctgtaatcccaacactttgggaggccgaggcaggcggatcacggggtcgagagattgagaccatctggccaacatggtgaaaccccgtctctactaaaaacacaaaaattagctgggcctggtggtgcacatctgtagtcccagctactcgggaagctgaggcaggagagtcacttgaacccgggaggcggagcttgcagtgagccgagatcgcgccactgcacctccagcctggcaacagagcgagactccgtctcaaaaaaataaataaataaataaaataaaataaaataaaataaaatctcactttctgtttctactgttctctcaagtacccctctgccttctgttacttctttgctgcattctgagaggaatggggtggggagcactctttcctgtagaaccccataacccatctattttcatcaatttatttgaaattcaaagccaggggttaaaatgtccactttcaatttgagatgtctaactttcagataaatctattaacatgcatttctaagtgacttttaagctaagcattttattttattgagctcgtatggaagggtaactattatacttgtataataaagtgcactttcaaaaatactcggttcaaatgtaaaataatattcgtaatattttaagacaaacctcctagaacttatatgtgtctttcttcccagagcagtctctatgggtgcctaaacaatactgcattattagatttttttcagtttataagccacacaagaaagttaacccatgtcatctctagaggcataaaaatagacagttgttctgagaaacatatctgtttattcctagttcagtaacagcgcaatgagatcctaaattatgaggtactttttgtttatcttattgtctcattggcaaccagcaactcctgttgcatttttgacatgggaatctatcagggtgtggttaataaagtacatttccatggtaagtattctttaagaaaaaataaaccaagatttcatcagagacagaaattactgcaaactgtacttaccagtttctggtgatttgtataactgagctttcaatttcaaaaattaaaaagttctctttagtgtaacatatttttgtgtccagtaattttacttcaaaaataaaagagaattttctttaccatcaaacaacgttgctgtaatgagtggtgatatatttagtcctagaggaccaaagagaaataaaatggctttgattatgctggtttaagaaaatatatccgatgaaacagaggttaatatttgtgatgtttgatttagtaaaattataagactaccaaagaaaactagaagagcaaaataaccaaaatttatataaagaattcaatgttgataattcaaaggtttagaattttttccacctttcaaatactaagttgctgttatagatttactaccattattacccagattttctattttactaaaaaataataacacagttcgttatgataaatcagtatagatctttaggctcaacacaaccctgctaccttttaaacttttttattatacaacaaacacatatgcattatcaagaaaagatgagtttagcaaaatgaagaaaaatagtcttatcaactagaaataagcaccattaaaatttctgtgtgttaaaagataatatgctgctgaaactttttttttcttgaaatgtccctcttttctttcacttttcattttcttaatccctaaccttctactgttgaattttctggaccaccgttataccccctcatcaatagggcatttttttctgcagtagctgagcacaatggtcatattgaagaaattcccttgtgggggctttgcctagaggtaaaatcctcttggccgggtgcgttggctcatgcctgtaatcccagcactttgggaagctgaggcgggagcatcttctgaggtcaggagtttgagattagcctggccaacgtggtgaaatgccgtctctactaaaaatacaaaaaattagccgtcatagtgtgcattcctgtaatcccacctactcgggaggctgaggcaggagaattgcttgaatgccggaggcagaggttgtagtgagccaagatctagattgtgccactgtgctccagcctgggtgacagagcaagactccgtctaaaacaaaacaaaacaaaacaacaacaacaaaaacaaagtaaaaccctcttcactgtgatgactctaaagcttgcttttgtctctctaaatcacaacaaaccgtttgcagtgtgatgctgtgctcaaaattgagaattctcactgactgttccaggcatctgtctactcattcttgccatgctgagggctgtcatttctcaccactgaatgcctttttttttttttttgtgcttctttttaaaagtcttttcctgtttgctttgaacttcaataaaaacagggggtaagaaggtaatatgcttttattttgtctgtggggtttttttcttccttcttttggttccttttcagatcctagctcatcaaggccatttgccacactgacactggaataagcctgaatgggggtctatatttcttccagtagttagtttaattcggtcattgagctgttgctctatttgtaaccgtcatgctagatccgagggctgactattcctgagaaagtgtggagatcctttcagactgccatggtgctagggcagagtttcagtcattatcttctgtgtctgctaattcttgcatcatttcttctactctgtaacctggttggctatgaaaagtgattcttcctcactgatgctgcaggcaatgggtgaatatccaattgttctctcaggttcttgtcatcggatacaaagaacaaatttcatgtgtccctgtttctgagaggttcaaagggagcaaatgcacagattctagcttaggatgacttccagcttctaactatttgtctgtgcattccatttcctcacccctgcgagaggttgcagtcatggtaacggctgttctgagaaattcagtgcccaaactggagggaggggaacacaaactcagcttcttcccaagcttcagggcagggctggcaagttttgccttccccgccagcaagagccctggctttaggggtcttgctacagttttcccagactggaggtcttggggctggattctggttcttagcgaattcttgccaaacacctcccctttccccagtatccatttgttttgaaggttctttgcaggcttcttgccaataattgtcttaaaacaaatggagttgtttgcatacctagatggagtaaaatatttaggaaactattctacaaatatgaaacagcccagatttgggccagaagtcctggtcctgagtctcttgttagccactcttaactgtgaattattggacaaatcatttctcgcactctgtgtaatctgtcacctgggtacttgatgatttaaaccaggaattgtggcccttctcataatactgtctcctaaatattgggtgaatttagtatatcaaggagggcagggcactatacccgtaggggactctctctctccctctgtctctttgcctttctcagatatgcatctttggtggcagacctggggttcaaaccacagttgttttgaaatttctctttccttctccactatgctccccctcactgaaactttaataataaaagtagcacacttattgggcatgtatttgttatgtgccaggttctgtgctaacagctttaagtgcattattccacgtattttcacaacaagcctgtgaggaagaggttatttccacttatagataaagaaactgagacttggagaatgtaagtgattttacccacaaacacagggcagtaagtgggaggccctgttcaccttagaacacctggcttctatcattcatggtgctgtttctagtgtggtttgaagaacctgagatccaaactgctatacaagtgacctgctgctttcttggagagagaaatctgaaagacagtggagccctcacattgtctttgcctgtgcacagcagatactgccaattttgggtgggttacacttgtttaccacgttgcttacttcagaaatcaataaaattctcttcatgcttttattttacaggttcttacgtctgttgctagattatcgtccaaaagtgttaatgcccaagtgactgacatcaactccaagggattggaattgaggaagactgttactacagttgagactcagaacttggaaggcctgcatcatgatggccaattctgccataagccctgtcctccaggtatgttacacaaaacatccagagattacagtgaaagtcacagttaggagtagcacatagtaatcatgactataataattttacagtttttggttcccctatattatataacataactgagagaaaaacaactatgaaattattttccaaagatgagttttatttatatttatcacgcttatttgatgtggttatggataaatttaatttacaagtgacatgcacctctgaaatgagaagactggtctatttggctccatttttttctaagcaaaaatgactcatttgtgaatatgaaagcttatcatgtcaaaactgattaggatctaccataacaatagtggaactctgaaagcaagagacttctcctcttaagggatatgtctcagcacttcccttcaatcagaaggtctctaagaaagctgtcctggcactgaagcctgcaaaatatatttgcattttgcagctgaataactagacgaataagaaaagcaacaggcagaaaccaacagcttttttttttaaatcaatactttgaagggcaaactaatttcagatcacaaatccttcaaacactggtaaattagaagctaagcaaaatgcaattgtgcaaacatttcttcaactttgagtagagttgaaaaaaggaaaatagcacatgggttcatgtgatagattaatagaacaaaaaaggactgtagtatgtttcatggttgtcctcccaggcttccagcactcaagctgtaaaacaggatgggtcctgtttgtgaaaagattctaccagtctccctgtgcttcatgtccagattttaataaccgttatggaaaaatctcccctataacccaacccatttatacttaaacccatttacacttaaatcttctccaacacgaataaagaatggcgtcctggctttattataacctgctaaacacaatcaatttgctctatgaattgaaatctttgttcataattttaaaacctaaaatgtaaattaaaatgaacaaaatatgctttgcacatcaaactgtcaaggatttttgtctattgctttttcggttttgctttgttttattttaatttaagaagtgaatgtaaattgttacaaacttttaagaaatacatttggatatatgagtcaaaaatttgaaaaaaaattttttttaacttttttttcttattattatactttaagttttagggtacacatgcacaatctgcaggttagttacatatgtatacatgtgccatgctggtgcactgcacccactaactcgtcatctagcattaggtatatctcccaatgctatccctcccccctccccccaacccactgtttatacttgctaagatagcaattaatttatacgaaaataccctgagaaaataatcaaaaataaaggaaaatattgtacacatgatatttcattatcaatatgatgtaggattccttaggtaaattctggaatatttaaagactgaaatagtatgtatcaaagtcatgttttctgatatatttctaatataatcctcaattatataaaccttcttaagtaatttccaactgatctggctggattaactgattctccctgatccgtctataaaatatcctggatggcatccaaccatgttaaatactcttcccacttcaattccctcttgttgaattttaggcttatcaatatctaagttgcttccaaatctgtttatgctcattagtgttgtgatattcatatgtaatttgattgaatattgcataaattaatgaaatacaaatacagagaaaagacagattttatttctaagaaaactaggttgagtgctttggagaattcaataaagatgagctgctaaaatgttgttgatgaattttgtgagggaaaaataaaagttaagtagtaggaaaaatcacaaaaatctctaaagccattcatagagattattggtatgtttatgttttcctttcatcaaaaacgaagggagggagggagggagggagggaggagaaaaaaagaaagaaatgaaaaaggaagagaaaaatagacaaacaggaaattataggtgatgcattatggatgtgacttaagaaagaacctgggattataataacttctatatcacaaaattgtcaaatgattatatagttatattttataaattaaaacaaaatatttacagtatttttaagtgatttcctatgtaaattgacatttttgattaaatgatcaaagaagtcctccccacatcatcatattcaataagaaggattctatggtatactgcacacatatttcatatatacacattgtacatatatatatatacacacctgttatatatatgctcatgcatatacatgtatgtatgtattatatgcataggaatgcaacaaaataacggcaatatctccagattgttgatatatagttttttgtttgtttgtttgtctgtttttttgagatggagtctcactctgtagtccaggctgaagtgcagtggcatgatctcagctcactgcaacctctgccttctgggttcaagcaattctgcagcctcagcctcccaagtagctgggactacaggagcacaccacaacaccgggataattttttgtgtttttaatagaggcggggtttcaccatgttggtcagtctggtctcaaactcctgacctcaggtgatctgcctgccttggcctcccaatctgctgggattacagacatgacccactgtgcccggcctgatacataagttcttattatactttcctgccttttccaacatttctataataagcatatgtaccattatactaaaaaaagtattttaaaatctgattttcaataaaacaactacttattttcttattttaataaattttgttttcatactttggaggaacgaaagaacctgtggtttactgtatctccattataccaaggaagttgtgctaggcacattctgtaagataattcattaaagagaccaattcattcagagaccagtataataccactagcaaaaaataaaattatacttggacttgggttctgttttctttaaatattgctacaatgttatatagccctatgcactatttttgaattttgttctgggaatctccagtttgttttttactattgacagactattatctttacttactaaaatagcatatatatttacatgtcataatttgctcatgtagtaaatattttgttttatcaaaaagaatatatgaagttattaaggaattcatgttcctaggaaacacagcagaaattaattttgctgtataggtgagcagagcagattaaactgcttatatttttaaaactagttataccattaacaattagagtcactagtaatgtttttctcacacttcccttgatattttctgtcactttcttcttaattctctattcccttaccttcatctagctttccccatagcatttttttagcacttgatatcaatatatttatttgtgtattgtctgcctgcatcccaagaaggtgaagtctttggtgatgaagggtttatcttatttcctgcataatatcaaacttctaaaaagttcctaggactcaataggcatttaataaacacctatcagataaatgaattttttaagagaacacattacataatgctttctaatagcaatacagtgacaaactttatttttaagtaaattaatgcaaatatgtatattatttaaaattgtttgtttttaagataacaagcctgatagataataaattttggcataaatatgttaatgcttatcaaaactcatcagtacatatcctgtcttttgatgaaaaagtaatagaaaggggagaacaaagagaactctcatgctcactaggcaggccgagtgcagctctgacagcaatgcaagagaaatattactatctccatcatatgcaggatgaaatttaggcttggagaaaacaacacttcgttaaagattttatagctgctcaagatttgaccaaggcttttaaaacttcaaatgttcttttccttattacactgtttcttatcaggatttgtggactttggaaagtaaaatgaaaagtcagagcaatgtgagttagtttgataatctcagtggccagtaacagctatccccactctgaatatataccaaccaacctctcccctttctccaaggaagttagttcttggcaaaggcatttcatgcagtgtactttgtcattctaaccttcctttttttttgtatgctcctgttgctaatcatcctatttctatgggcttcagtcactcttttagcttttgtcttgggagactttctgtctgttgacatgacttttaaaataatcttctcccccattgtatttatatctcattagcctaccccccctccccttgtgttttagaagagttttattgtctgtcatccctctatagttcccaccctgttacctgcccgtgtcctgttcaaacacttgctccttttttccttgggcaggtgaaaggaaagctagggactgcacagtcaatggggatgaaccagactgcgtgccctgccaagaagggaaggagtacacagacaaagcccatttttcttccaaatgcagaagatgtagattgtgtgatgaaggacatggtaagagtcttaaaatgcaattgaaagaggccaatcttggaatttcatgtagaaccatttataagacaatttgaaattggggcctactgtggtgctatgttgacacacaggaaagggaaggacaggtggctagggtaccgcagaaccaggtgccgagctaactactggtctagacctttatgagtaagtctaggcaattcttccagatataggagaatgagtaaatatgaaccctaggaacagggttcatcagctcaaatcaaaagctcagaaattattttttttctggccttgacttacgcttatataatggtgctcgttcatggccagaaaaattcagaagcctgcagatacaaggacacagaaatccaaaaggtaggtaggaatgctccccctttctttggggatttagtttgtcctgataattccatctggggacctgaattttcatggatatctcaatgtattctaaggacccagattgaagtataacagaagtgtttctagttttgtttgacatgaagaaacctctggacataaagcttttcccatccctattcagcctataaagcaatgtttctcatccctggcagtgcattagaattgcttagggagctactaaaaatgtttcatgtttaggtcccatctcagggcaattacatcagagtctctgagtgaggaccttggtattggcctgatggagtaagtctggggtagagcctaacattctacatttttaacaagctcccaggtgatgctcatgctgccagtccccaggtcaccctttgagtgttaaggctagagactagaggaacaggggagacgtctaagtattggtgaggtttgtcttggttgctgctaaatgattgctggccatttcaacctggggtttcctgttctgtgtttaaacactgactgtattactggtgtcatgctgtgactgttgatataagcagtggatctcaaaaatccatgcagctcctgcccaccattttcatagtctgcttataattagccgctataactaatagtttccaaactgattttctaggcttagaagtggaaataaactgcacccggacccagaataccaagtgcagatgtaaaccaaactttttttgtaactctactgtatgtgaacactgtgacccttgcaccaagtaagttttagtctttctctgattaaaacactagatataacatgagagttatcattttcctagggaagtaacactgactgagagttaagaattagggttctagtcctgctttgcctccaagcaactagatgactgtttgctcatttaaacactggtgaacttcctgtgtaggtgacactttgctggccacttaagctaaagatatgagccagacatatgcctggcatcaaggtatcagtccagaagcacagacagtcaaggaaagcaatggttattgtgtttcaacagcatgagaatagcatcagaagagacttatgttccaggtgttacaaattatacagaaaaacttttcaactctgcctgaggagatggaggtgaagacatgaatgtgtctcatgacttgaatcttgaagaaagaaaagaaagagcattaacaggtgcacatggatggaatgcacattataggcagggaaacagcagctgcaaagagacaaaggaagctcaggaaaacagaatacctggctggagtgtaggaaagactgagaagcgttcagggctgaatcatgaagggccttgtcttttaggctaaagaggttggttttgacccaaagttagagaacctgccttgtaagtcatcttgggaagcttttaggagttcatctaataggcttaagaaataagcacatgatgccttatgttttatttgctaggaaaattttatgtacagttgtcccaggctctcccctggccacaagtgtctgagagtgcccctatgatgacaggctaggtaggcattggggaagcagctgacttagtaaaataataacaataatagtaattccaaatatttcataatcttgatttaattttcttgtcatcataaccttttgaaatagataatattatttccatgttattgatgagataaaaggctcatggcagtgtgacttcccaagctcacctagtcaggtaatgggcagaggctgtgaactcagacaacctgattgtgaatgtttgtctgtctgaaggaaatcacacatgaacctcttgagtctcctgatcaccaccggttgctaaaagtggcagcctctaagggccagctgagtaccctccctgagctacatcatgggcgtggctatcacctggccattttcttggtctataggaattttttgaaattacttttgacagtttattttaagagctagtttaagctataggatttacgtgttcagtttattactaggtttaagtttatttttgtatccacttcatctctcttgtgtgtcactattttcctatcttcctttaactcttgaaatcttaagacagagtcattccttatgatatttttcatccagccatccaaattatattaacttgtgccagctttagatactaatttagaaatatttgaaggaatacgtttgccagagatgcaaagatgaataaaatggcccctaatttacaaagtgccattgaaaattataaaggaattattctgccaggcttttgaatttctcctgtatttttttttctagatgtgaacatggaatcatcaaggaatgcacactcaccagcaacaccaagtgcaaagaggaaggtaattatttttttacggttatattctcctttcccccaaccccatggaaagatgtgaagaaaaaccaatcactcttgattactagaaagtcctttatttaatcttaaagattgcttattttcatataaaatgtccaatgttccaacctacaggatccagatctaacttggggtggctttgtcttcttcttttgccaattccactaattgtttggggtaagttcttgctttgttcaaactgcagattgaaataacttgggaagtagttcacaaagatttgcctcattcttacctataaaaagctaccactttggtagatttatgtattgttaatttcttgcccctgaatgcagccttgagagctgactgataagaacaaatgaaattattcctcagctagtttctgagcaacagttttggggcattgagtggtattctcatccttcctatgaacaggtgttctctgcagcagcagaattggccaaaaatcagaagcaattcttcactattcattgagatctccctatgcaaaaagagaacacaagaagcaaaggcattcccaggaaacacattgcagggaacactttaaaaacttgtacttcactgcctcctcttcctcggcctaattgcttgtttttaattatttctccttcttaacttaaaatactatggggacacatgttatacaaaggtgacttagtagagtcagtagaaaagccaaaattagatattatcataattagtctagaaaaatccctttaagtcattcatcaactacagggtcacaccaactttcagtaacttagaagtattcaattttcccttctcagaacaattatctgtttcttcagttcagttgaagaagaaagtttgccttgcctttagcggttgtttagctgaaaatacatttgggatatttaagcactgtaattgtgctcagagacatacagattcttctatctcacattgactttaatgcatacacctattgagtatgtatgcttgagttatttgtgtgtgtatttcatttctgggcatccatagcaagttgatgttgacttgcttgtcctacggcttctgcatcctgccatagtcttgccgtccacatctttgctggacagagagtggtgcttgccatatggtaagtcaaaagccatctccttgctaggccagcctgtggtaattagatgactaattaagatatgtcctttcactagaacacttgacttagtagtacgaaagttccaaaatcagcggtctcctgcgatgtttggccacttttaagtttcactgaatttctcctttttccttcttatatttctcttagtgtgaaagtatgttctcacatgcattctacaaggctgagacctgagttgataaaatttctttgttctttcagtgaagagaaaggaagtacagaaaacatgcagaaagcacagaaaggaaaaccaaggttctcatgaatctccaactttaaatcctgtaggtattgaaataggtatcagctttccttgaaaagaaaaatagagaaattagtgatttggctttttgttacttccttttacttttttgtttcttgtttgtttcattttgtttgagatggagtcttgctccatagcccaggctggagtgcaggggtgcaatcatggctcactgcagcctcaaagtcctgggctcaagtgatcctcctgcctcaactgtgaccctgggactacaggcatgcaccaccatgccaggttaattttttatttttattttttatagagacagggttcactttgttgcccaggctggtctcaaacttttgacctcaagcaatccttctgcctcagcctcccaaagttctgggattataggtgtgagccatcacatccggcctgttactttctttatttaaacattgcttgtgtttgtgggtgcataggttaaaggggcctcacagatgaattatgatatggtacccaaattaaaagtaaacttgtacacaaaaaccgtaagaatcaacaaaggagggaattgagagtgtgctgaaaatgagctgaaaaaagaacttggccaacctccatgttccgtgttgttgttatccctgcagagaaacagcctttaccaggcatgggttcagtatccaagcctgagcaaagagattgctcttaaagtttgtcataagggcacagcttaactttctctggctgccggttgaccttatgtctcaccatatcttttcccaacatggtatcaatatatttcagatagcaagaaatacaccgagaaaagaaaccagttgcacttaatggaattattttcttatttggggccagggctcagtgggagttaggattctttaaattaatatggtaaaaaaaatttcaatttgagccattttctggtattaagaataagaatagttacagggaagaaaattttagagtagttatatttattatttattttaataagtctatatgaaaaataacctcaacctattttatgaattctttaggtttcttgcctttaaaaactaagacaatattgcttagtttctggcaaggccggaacctttcagaataaaaattgaatggtaaaagtaaccttcttaatcacttaatctagcttcctaattttatacatcaagcaactgattgtacttctttctgaattaaggaaaaattagaagttcacatttagaatattctaaagatatatttttatttgtctttctctgcttccattttttgctttctaggaaacagtggcaataaatttatctggtaaggcttttatcattttatttcatagagatggcatcctttagagtaataggccaatttcagagtaaaataatgttactaatttcagtgacatattatgggatcttgttatttctcatacaattctacctgctcagcataaagcatttatcaggcagtttgtttaaatttataatgaatactcatagttaaaaataatcaagtaacaataagacacaatagtctgaggcttaagaaacttttccttcataatcagctagatgtattacagaactcctgcctaaaaagatctagaggttaaagtgtactgtagactcaggtattatcagtgtacccaactctataacaacatacatgattccattcagttgttctttgatctgtgatttagagataagatgatcataaactctttgcttatacttttagatttgtgggtcattgatcattggatccataagagatgttataggtgatcttttccaatcctcttaatttataaatgagaaaagaagatacagaaatgttatgtattgtggcccaggttatttaacaaattactgggtatatggcaggatttggagttagaactcaaggttgtcttgtttctgtattcccctagtcagctcttcatagacctttaggacttagctatattctgaagtactataaaaagagaaataaacatggttttcactaatgggaatttcatttagaaaaacaaattttcagactattttctatttttcagatgttgacttgagtaaatatatcaccactattgctggagtcatgacactaagtcaagttaaaggctttgttcgaaagaatggtgtcaatgaagccaaaatagatgagatcaagaatgacaatgtccaagacacagcagaacagaaagttcaactgcttcgtaattggcatcaacttcatggaaagaaagaagcgtatgacacattgattaaagatctcaaaaaagccaatctttgtactcttgcagagaaaattcagactatcatcctcaaggacattactagtgactcagaaaattcaaacttcagaaatgaaatccaaagcttggtctagagtgaaaaacaacaaattcagttctgagtatatgcaattagtgtttgaaaagattcttaatagctggctgtaaatactgcttggttttttactgggtacattttatcatttattagcgctgaagagccaacatatttgtagatttttaatatctcatgattctgcctccaaggatgtttaaaatctagttgggaaaacaaacttcatcaagagtaaatgcagtggcatgctaagtacccaaataggagtgtatgcagaggatgaaagattaagattatgctctggcatctaacatatgattctgtagtatgaatgtaatcagtgtatgttagtacaaatgtctatccacaggctaaccccactctatgaatcaatagaagaagctatgaccttttgctgaaatatcagttactgaacaggcaggccactttgcctctaaattacctctgataattctagagattttaccatatttctaaactttgtttataactctgagaagatcatatttatgtaaagtatatgtatttgagtgcagaatttaaataaggctctacctcaaagacctttgcacagtttattggtgtcatattatacaatatttcaattgtgaattcacatagaaaacattaaattataatgtttgactattatatatgtgtatgcattttactggctcaaaactacctacttctttctcaggcatcaaaagcattttgagcaggagagtattactagagctttgccacctctccatttttgccttggtgctcatcttaatggcctaatgcacccccaaacatggaaatatcaccaaaaaatacttaatagtccaccaaaaggcaagactgcccttagaaattctagcctggtttggagatactaactgctctcagagaaagtagctttgtgacatgtcatgaacccatgtttgcaatcaaagatgataaaatagattcttatttttcccccacccccgaaaatgttcaataatgtcccatgtaaaacctgctacaaatggcagcttatacatagcaatggtaaaatcatcatctggatttaggaattgctcttgtcatacccccaagtttctaagatttaagattctccttactactatcctacgtttaaatatctttgaaagtttgtattaaatgtgaattttaagaaataatatttatatttctgtaaatgtaaactgtgaagatagttataaactgaagcagatacctggaaccacctaaagaacttccatttatggaggatttttttgccccttgtgtttggaattataaaatataggtaaaagtacgtaattaaataatgtttttggta

SEQ ID NO: 34 - DNA, 87641 bp, Homo sapiens
ggagagggagaaggctctcgggcggagagaggtcctgcccagctgttggcgaggagtttcctgtttcccccgcagcgctgagttgaagttgagtgagtcactcgcgcgcacggagcgacgacacccccgcgcgtgcacccgctcgggacaggagccggactcctgtgcagcttccctcggccgccgggggcctccccgcgcctcgccggcctccaggccccctcctggctggcgagcgggcgccacatctggcccgcacatctgcgctgccggcccggcgcggggtccggagagggcgcggcgcggaggcgcagccaggggtccgggaaggcgccgtccgctgcgctgggggctcggtctatgacgagcagcggggtctgccatgggtcgggggctgctcaggggcctgtggccgctgcacatcgtcctgtggacgcgtatcgccagcacgatcccaccgcacgttcagaagtcgggtgagtggtccccagcccgggctcggcggggcgccgggggtcttcctggggtccccgcctctccgctgcgcttgacagtcgggcccggcaacccggcccccgggcggaaacgaggaaagtttcccccgcgacactcacgcagcccgactcccgtagctgcagggattgtgagtttttcttgaaaaagagaaggaaagttcagttgcaaggggcgcggggcacgtttggtcccctttgtgcgagcaggaaaggcgttgtgttggccgcgttcgaggcgagcccccacccccggaaagggaagtttgagaagttggttatctgaaggcggccggggagcagcggcccggagcggcagcctgagctgccaaagcagccagcgcacctgggccactccgcccatggcgatgccgcgtgcccacccagctctttctgagccacccgttcaaaaggccagctcctcagtccttagctcctggagacggccacgctttccctcaggccggcttcttggcccggagtttttggaaacaagtttcaagaaaataatcgatttccaaaagaaagttagctggctccactgacgccttggcatggatggatagggagtggagatgctcaggtgaaaccgagaatccctcactgaatgcctactgggtgctagaggctgtagattttgcctggaacaagatagtcctgtcttcagggagttgatggttctatgcaattatcgtttgttggaaaccgaagggttaaaatcctaactaggctacccacctgatcgctgtctctgaaggtttttaaggaaaaaataaaaataaaaaaatatatatatatattatatatatataaatatatatataattatatatataaatatatataatattaatatatatatgcatgcaggaatgggggttcttaactatttgttatggaaagtgtaaaacctctgagacttcaaaagttagattttttttttttggagacggagtctcgctctgtcaccaggctggagtgcagtggcgcaatctcggctcactgcaactttgcctctgggttcaagcgattctcctgccttagcctcccgagtagctgggattacaggcgcgtgccaccacgcccagctaatttttgtatttttagtagagacggggtttcaccatattggccagggtggtctcgatctcttgacctcgtgatccgcccaccttggcctcccaaagtgctgggattacaggcgtgagccaccgcgcccggccaaaagttagactttttgcagctatgatccaaataacagtatctgcagctgtggtctgggtaaccgagtatttgggcaagtcatagagctttttctgggccttagtttcctcatctgtaaaatggccagcttgaatctgggtaattttacatcatcttcatgtttaacatcttacgtatcgtgcccctcccctcctttcccctggctcttctggtgacttggagatgacccatgtagactttggatgaaatgtagaggagttgacagtccacatcacccggaggcactcattttatttatccagggacatgggcagatttacctttaggtttgtctagaaaaaatgcgcatcacggtcagttgtaaattttagagtgtttgaagtggattgggaactttttaaaaattatggcatacattgaaggtggcatggagatggaagcttttaatcaaattaggaagaggcactattgcaagcaaaaagtcttgacacacatttgagtcctatggttttaataaaatcttagtgtttcgttcttggcgtttttcctgcattgcagtaccagaatgttcaattgtctctcattttcctccagacttttaaaacctaagtgacattttgctaataaatatttaaaatggcacccttaattttctgtggatgttaaaaatcattacaacttttgttccagattataaaagaaggaaattagcaggccctgatgttgttagttaggttctgtttacaaggataaggtttatgatttgcaaattccagacccaatagttcacgagtcactttcatttcatcaatatacacacttttaaacaattagcttaaaaacgtggtggctttttatttgggtatttagacagttttacaaggcccacagatttcatatttttatagaactgaagtttcaaaatggttgaattaatgaatcattttgaatttgtattcatttgattcaaattaaattttcaaagttggccaatggttgaagacagatatattgaagacgagaaacctaattctacttacattttaatttttcatgtaagtaaatagtttcagaatttctctaacgtaattggtaaactgaaaacattttttcaaaatatcttaatgcaagataatatatcaggtaatgagattgtttaataaacaacaagctccttttacgtcacctaaaaaggcccaaaaatctgtcttctgtttagtagcttctgtacttctgtttagtagtatgcaaaggatttaaataaaagaacaaatttcactaagaaatagaaagtttttttttcttcgtttttgacttaatagattcactcttcctaaatgatcaaaattaagaaatgactcttttggggaaaactgtaaagtgcacaataactcttcaggtctgaaaaatatgacttttcaggttcctggaagtagatagattcttattgaggacaaagaatttgtaaaagtgtcatagtgatcaggttcttcacatcactttaataacctgcttattttgtcagggtaagagactagacatcattaggccccaaatctgatcttcagtctactcgtgctttttttccgcctcataaaaacacatttccacctttaggccactcaacatcttatttttaatgagttatgatttatacaaaatactaatcacattttgaactcattgccttcttttcaatgtagcattccctaatgatgactgttgtctatgtagtcaacataactactacatgttttctactcagttatgaacatgactttttaattttttcagtaaggttagtttttaactctggatcaataaggcacctctgatatcattgcaaaaactgggcattttttcttctaccttttcaaccatatttattgagtatctcttgccaggcaggatgctcagacctgggataccatctcagatgaataagacagacctggtctttgccattgaatttaacagctgggagcatgttataagtaaagaaaaggatacgtgttttaactgtttatatttgaaagcattatggaatactggtgttttattttctacacctcattttcaaaagcctcatttttttttgttgttgtatgcactaggaggatgtgcatgttgaatgtttccttctaggtcccattgaatgtatttttgaatcaatttgttgtctctttcctatccctgccttgtcacggagccccagttgggcagcctttaattgcattctccattccatagccagcatgatggacccaatgcgttcatttagtgctctctttgaggataggctggtggtagaagagtgtagggtataaactttggaatcaggccgtcctgggttccagacccacttgccatgtactggctgtgtagcctgttgtagttgctttacctactagtcatccctggtctcatttgtaaaatgaggattatggagttatggtgaggattaaataaaatattgttttaaagtatttaacatggtgcctgcaacatagtaaatgctcaataaatatcagcttctgttattactattaactccttaattgggcttaccaggggcctctgacctggttcccatttgactctgctgcttcacatcccaccacagcccacattttcccagtctatttgtgtcactacacatacacacaatgtgagcaatttaggcagctgttcctttgttcaggatgtctggaactcctgctacctggctaattttcactcatcttttaagacgtagttcaagtgtcatcttcttgaggaaacctgctttgaatgtcccagtttgaggtaaatgtctcctatgagatacagacctctcacttagctggtaacaataccaagccaaagtcatatctttacgtaactctcttgcccattatacctttaatcctctcaatcttattcagttttctatctctgggatctctggcagtgcctgacacatcatttagcacccaggaagtgctgagctgagcctccacttcatcctactgtatctaatgcaactgaggtcgagcatttaactaagcagtcactgtttgttaggtgtttggtccaaatagtaaaatctttactttcagttagaatagttttagttctgatcacaataagtaatttgactgtttttgaagtatggaattggttcttgtattctcatgaaatatggaaaaagatgtttcaacttctgacaaacatgatggaaagctgctagaagttttcatgcaattcctttagccataaattttgaatcagtgtagggccttgaaagccactgcaaaattttaaataaagtcaccagaggaattatccagtagatactgattcctcttttttttttttttcatagaagggtgtcggaaagagaattttattacgaatgaagtgctaaaatctaaatttattttttaagtttcttttttcattgggttttatgttttggtttataagggtgaagcagcgttggttgaagggaagtgtggtcttgtagccaccactgcctactctagagtagcgtggatattatttaggtctgatgcaaaccaccaaagcagttttaaatagggtgcaggggaaacatacttcctggctacagcatggcattatttggccaagttccacataaaagcataactctgttaccttgttagcttctaccctccaggtccttatgtacaacttcagcagatttaagttatgattttcagtagaacagatatgcattcgcagcaagaatgctcaccgcttcttttgcactctctactttcctggtaatattttgctccacaggtacttgttgcttgtgactgaggcaagataatgactcatacttctttgcttggcatgccaaagggtttggaatgctggacaggcaaattgtctcatctcagggagaaggaagagaaagacaattaacatttgagaacctaccctgagacagccacttgatattatgtatctcatttaatcctaggaagaaatctccaagataagttttattatctttattttatggatggaaagatggatcctgctcagggtctctctggagttttgcctgggtgcatgtatgagtgtgtggcccaagcttcttgtgcttgcatgctgctaggttctttcgtgtggtctctatgtgtgtatgcgtgtgttgggagggaggctgaagaggggtgaatggatatcagatttgagagaggggaagcttaccatctaatgtcatcagttcagtgctcctgatttaattgatttggtttgcttgcattatctgcctccttcctgactacatttgtaccacagaaaatcaagataaggcagagtttctttgcataaggaaactctacagcccacagtttgacaatggtgtcttagtggtaggactcatggtgggtgacctgtggtttggccacttatagcagttggacataccccatttgcaaagatgtgtattgtaaaccccaaattttgagtgtgtaggacaatcatttgtgtacaatcgtgtacaactgctgatgagggcaagaagagccgactttatccaacataacaaagaagaaggggacagtttgacttttgaaggggacaatttgaaaacttataggaggttaagattctcttcctcacccattacatcaggagtacttctgccttttacttgccacagtcagctttctaggtcttagcacccaacaagtagcaactatcctcttgggtgtagtcagtttagtctacttatggcctcctgcttagactcttaagggttccctagcatctgtgttttgtttgtaggtttgaagctatcattattagatgagatttagcttcagggcccgtacctatgactggggagattctatctgggaaaggtcaagacatgcagctcttttttttttttttttttcttctcttttctgagggaatattttcctccaatttttttcagctctacaactaaaatatagacctagtatatgaacacaactggcctctgtcctgggccttagatggtactctgctgtcattcttctctggtcagagccatgcctatggggtgaggtgacttttgggccttccagtcttactctcttttcatttttagaccatgatttggttatgtgggaacccacattcgctgtccagaaggccctgaactggtatctgcagtttgcatggatccttgaagccatcttcctgaaggctgtcattgctactggttgtgcaatctctgcacgagggttgtttaagggatagctctgtgtgtgtgtgtgtctgtatgtgagagagagagagagagagagagagaaagagagagagagacagagagcgagcttgggtgtccacatatcacaaggcccctcttgatgtaggatggagcaggcaggggggaggaaggcaaattgattaccagggctcaggatgatgtctctctttaaaccacccatttctgtggaaggactatgaacattgtaggagttctaaagttgtacctggtcttccaagacattgaaaagatatatttgtcagtctaggtagaaggataacacctattttattgagcagtttgctagcttgatttgtaactttaaatgttttgacttatggtacatgggcctctatttgctcacttgccttgggccttcccatgttgggggtggatctgcagcagcaacattcctttgcagagatgttgggtagaaataagttttggttaattgtaccattttttccctggaatagacaacattgaacattaaagaaaaaatgagttactttgtagacatagtgctctatttcctttgggaaatgtagtttttcttagtttgcgttgtcctgaagtgaactttagctctatactttttttctttcctttttttttttttttttttagatttcctagtgccctagttgcatttcttctgtgtattgagagaccaccaggcgggcaaggtgaagtttatctgaatgttttttcctcctattgtaaatattttatttgaaccaaaaaaaggcttggttcttctcaagcctctttaaagaaaacaaggaaaaaggcttctcagtgctttagaagatataagattgtcaaaacttcattttagagaactagggatttggttgaaccaacatgaatgcctttgaaagaagatatgggttgggtgcatattttcagtatatgctgcagcagctctttattaaagtataaatcattacgaagtcttcatttcctatggggcgataacactgctgctttgtggatgactacctgtcacgcccaaatcctgcaaacttttctacatagggaaatgaaattgggcttatttcccctgtagcttttctcaagagacttcatggactaatttcccaataatcatagtagctaccacttattgaggtcttgctactgcacggatcatgctgagtacttcaggtgtattaaccctcaaaacaactttagaaggtaggttatattatgcttattataaatcctccagagtcaataaatttgcctaagtccacctagttagaaaatgattaggctggggttggaaccaagatggtctggtttggggatctagattcctaattgttatactgtactgagactagtctgccttaattgacataaactacttgtccattatagcatgggtgttggaagactagaggttaagagaaataataatatccaacatttttctagtgttttagcattcttcatatattatcccattgcattttcttagtgtaataaaataacactcggtttatacaccaggtagtcaaacatcatgcctgtcttgtgatctcaatggaaaaatgaagtgtatacctcaagtgatacagtcttggctgaatcatggaacaattatgccatcaggaagtttaggtattctgagtaaaacaggcactttatttgaaaggactgggagacttcacagatgcatcaaatatgttgaggatataaatgccaggctcaggtggatttactgtgaagtgcttgaacttaaccttcaaggctacctataccctggtataggtccatctcctggctctaggagaggccctggcaatgtggttaacaagtgtcatcaagtcaaatactacgaaatcttgcagtgccctgaatcttacagctcacatataaaagaaacctgataaaagttttccaaatttgaagtcaatccaaaaaatttatatgacattacctgtaatgaattatgaagctgaaaggaacttttccaaattattcaagaataaattacaaattctgatctacatttctaaagggaagactgaattatttttctattctctcaatagagaatattgcaaaatgttattggaagagatgatcaaagagtgtgcaaccaaaaaatataggagaattatttcagaggtatggcaatcagttaataaaaatatttgttttttaaacacttcatatttgtagtatttatagcttttaaaaatttgttgtttgtatgatactatttaaaattttttttccagagatgagatctcattctgtcactcagtctggaaagcagttgcataatcataactcactgcagccttggagtcctaggttcaagcagtcctctagagtagctcggactaaaggcatgcaccaccaagaccggccagttttttgttttttgttgttttttaatttttgtagagatggtgtcttactatgtaccaagtctggtcttgaacactggggctcagaggaacctgtccacctctgcctcccaaagtgttaggattacaggtgtaagccactgcacccggcctgtatgccattttaattctaaataaatattcactttattcttaattttatattcactttattcttaattttgtattcttcttcttaaagagtgcccctgaaatttacaagcttcagattccaaagacctgagtctttgactaatggtaggatttgtttgttggtttagaaaataaatgttaaaaaatgcctcttcctccttccccccattgcaaacagagactgaaatctgcattgttatttcacaaaaccaaaatatttttcctccaggtttagctaaacccttcatcattttcctactttagagccccatgccaagtagaaaagaagttgcaaagatgtaattatcacaaaccttcatcttggatgaaagataacctagctctgacccttagtttgagattagaaggactctacctaggagacagctggtaaagactaaggtatgttgtaccaggaatctaggtgtctgggtgaccaggctgtctttcttcccactggggctcattttccttctatacagtgacaagaattggactaaataagatttccagtattttctcttctgaaacatttcattctttgttatccctgtactattttgttagtagaataaatcattgaagttgagttagaaaatctttagctaatcaaaatagaaaactaacaaaagtcatgacaggtcagaactgagaaataccacagacttccactggtgttcattggagatgactactattaaaaaaagagaagaaaaaaaaccatagctattttgaaaatttccgactacaggtgtctgagcatacatcctgactaaatagcatgtttacttcagctagagctcactccttcctaaataaaaggcttacttggttttggtggtaatattattcctctttggttaattatggtattttcattctccccttcctctgaattggttaaaatgtctgtgaaaatttttcctaaggtagaaagttatgaaatgctttgctatgcctaggagatgtaaagcctaaaggaactttcatattttttgggaaaaaaaaaaaaggaaacttgtctagatataattagtgttctgttgcctttcaaatatttctctaccacttttcttaaaatattctcagaaaagacagaatttgcaacagattggcagttttcagactgctgttttaggcaggggagtagctgccgcaacctctaattgcatttctgtagagtttgcagacacttgttagcgtagactaggaatctttcaacttttgctgtgagtgactaccttgttactacatatcggatttgcgtctcattctctaacgctcatagtattggggaagaaaaaaagacaatatgatataatttgtccttcaagtatgtgaaaaggaaaaaaatctaataataacattttatgttcattattttggaatcccttaagttatatcattataaaataatctaacaatctcaatacccctgggcactcttacttttatttttataatttatattgttagaatacatttctattctcttaggcctttgttcattctactttctcacttctttaggagcctcattccttcctgaatattacattttatgagttattatatgcatcaaggcccaaagcttgagctccagcattctgaccccgaaaatgatggtttcctatcatcttctgataacagcaactgaagatgttctaataccttgccgcttacaggaggtctggcatcactgagaatttattggaaatgaggattgtgggtcctctccccagacctactgcaacagaatgtacactttcacaaggtccccaggtgattcctgtacacatagcagtttgaaaaacactgctgtaatagcattaaagcatgttccaaagagtagccaaatgatctgcagtggttttagtggatcacatcaggcttgtttctgtcaataaagaagaggagaattcaaggaagagttggcttagttttatgagagtcttttgactcttcctaagccgttttaactaaagctagcagaagacagaaggcactggtagcaagtcaactaaatgagtcagtttttaaccagtctgtttccccagtcatccttcatgagtcttttgtccactgattgtccatcccttgaccatggtgaactgtagaacccaaggacccatttcttttttctttcttgttttttttttttttttgagatggaatctcgctctgttgcccaggctggtgtacagtggcgcaatctcggctcgctgcaacctctgcctcctgggttcaagcgattctcctgcttcagcctcctgagtagctgggattacaggtgtgcaccaacacacttgactaattttgttgttgttgtatttttagtagagacacggtttcaccatgttggtcaggctggtctcaaactcctgacctcgtgatccgcccgcctcggcctcccaaagtgctgggattacaggcacgagccatcgtgtccggccccaaggacccatttctatatcgaactcactgcattaatcatgtttacctcattaggcatttactcacagattgccttgacatatgtaggccctaattcattctggagctattataccacagcatttcttaaaataggtagcactctgctctatacaaagtaggtacccaataaattaatgattcgatgacaggttttcaggaagtggttttactcttcaacattttttaatcctcttttgtcttgaggaacttatttgtctgatgctcagtgaagacccaataaatttctcttgaattgctcaacatttgttttagacttttctgagagtgccactgtaggctttttcattgatttgctcctttattttaatatcataaggcagctttttgtgacttagttacttttgtcttccagaattatgggtccctgtcagttattaatgctcttaattaacagtagccacaataaccagtccttacaagcagtttctgatgtttccaaataattttattttctgacttttttttctttgcctttgacatctgaactatacttggcaagaaaaaaaaacataaaaactttccattgcaactcatatctcatggtgattcctgttgcatcaaatcttaagttatccatcagaaaagttacgcaaaatctataaccatttggttttatttttgcccttgaattatgctaccgtaacacaaacctgaactcttatatttgtcatctgtaaaaatcacctaattggtctctgcttatggacaccctttgttctttctctgtcaataacacaggcattgccctcagttaaatctccccccagatggcattttgaatagctggcctctgttagaaagccttccatggattttatgaatcctagatcatcacatggccttccctttctctttgagcatgggggctgcctcagtgtcccttggctcctaagagagtgccttgtgctgatgggacacaggaccagtttgatgactacgtgcacagatgaagccaaacctcttgcccatcatctattccacccttcacatccctcatgccctggttccacttgaacccagctgcctcacacatcctttttgcttacaaatttcctagcttgtgaccattctccaccacctccccccaagttttaccattctctatttgtgccctacaacggctccaccctttgaaataacgcctggtctaaatgttactttttctagtgggccttccttgattatccatcccactgtgattccttttcctgcccatagcctctccgacaagccttgcattctcattcatatgaccttgtttgccaagctacctgtgctgtctctgtgtgttttaaactattttactagccaggcgtggtggcttatgcctgtaatcccagcactttgggaggccgaggcgggcggatcacgaagtcaggagatcgagaccatcctcgctaacacgatgaaaccctgtctctactaaaagtacaaaaaattagctgggcgtggtggcgggtgcctgtagtcccagctactcgggaggctgaggcaggagaatggcgtgaacctgggaggcggagtttgcagtgagccgagatcgcgccactgcactccagcctaggcgacagagtgagactctgtctcaaaacaaacaaaacaaaacaaaactcttactagaatgaaaactctttgagggagaaacttctgtctgattttgccatagctcttagcacagattctcactaattctgtttatgtgttttgtttgttgctgtttggaattcattgcttttaaaggccgaggaaacttgcttttagatccaaggcggggagtgctatttttttttctcccagatggcttttcaccaccaagtgtaaatgtcaatggcttaaagccacctgtagtattgtttgacagaaccataggcttatggaaaatctcgtatgatctgctttgtgtaaattgttctttacagtggagacttgctctgtctgcagtctttagtttctgtgaattttggggagctgtggtgtgtgggtgttaaggttaattttccatccatcactggctctgcctttgattcatttattctctcatgtgtgaatcttttgcagaaggctcaatgcattatgactatagagaccaggcaaagtcataaagtaaatcacaccatctcacgcaggacaattttttgtcactcctgccttttctctttatgagtcatagatgatttcagtcattgggattgctggaatagggatggctgaaggggtcttggtgcaatgaagagtgcctgaagatactcttctacctacctgagggtaaataatcccatattgcaaaggtgacccctggttgtactttttggaaagccctgttaaaatgatacatgctaaggagacttaaatatgaggcctttcttacctgggtgcttaataggagtgggtttctaaggatggtcttgaatttggccttcagccttctcgtccaccatagtccccatccatcctgaataaacatgcagtctaggtaccacaagtagtgttctcttgtgcaagcacagcttccagctgtgttgcctgcctccctttcagccagatcatcacccatgtagccactcctctatgggaattctggagctaccactgacatcacattacatagatttggactggtagtgccctacctgctctatctatagaggaaaaggagatgaaataagaattttaatattctttttttttttttttttttgagacagagttttgttcttctcacccaggctggagtacaatggcacgacctcagctcactgcaacctctgcctcctgggttcaagttattctcctgcctcagcctcccgagtagctgggattgtaggtgcccactaccacacctggctaatttttgtatttttagtagagacagggttttgccatgttggccatgctgctcttgaacttctgacctcaggcaatccaccctcctcggcttcccaaagtgctgggattacaggcatgggccactgcacctgaccagaattttaatattcttaagtcttaatattctgtggcacttattggaaatggttgaaatataatgcttttaatttagcatgtcattggttcactctcaaaactactgaaaagcacttatctttcaagattttaatgatgatgttggtgaggacgtttgtggtaagtagataatcacttacattattcagcactttacaaagcattttcacaaactcttgagtattggttgttatcagtttattactgagatgcctgtggtgtcttcaggggacaggagagaatatgttaacttcttgaataactgctgcagccgtagttagccccctatgagccaagcctattggctttgttactcccaaggtataacttatttcatatatataagcaacttgactaagtattagatgtctgtgtaagccattttctgtgagtcaaaacaattttgttcttccttatgtctttcttcagaggtacatctttaataagttctgggaagggaagtgaaaaacaatgcttgacctctgatacaatgtactgttttgattatgatcagcactttaataaaatttatcatcaagaaagtctttggagtgagcccctgaaaagcttgggaaagtgattgatatggtgtcacttttcttaaattaccttcccatgttgctttagatgaccagggaggctaacttcactcttgtgctctctaaattgaactgtcctgaagttttaagaaaatgaaatgatcagactcagcagttcaagattgtgttggttgatagcagccacttagacctcagttcactatgggtttctgtgtactttattggtggtcaccaagatgcaatgaaaggtcctgattttgtgaacatttctgcccacacccttctttggtacataccttttgagaatatgtaaaatgtctttcattgttaaaatagctgttaaataatattaaaggcaaaaaaaaaagtcatgaaaatagtcatttgcgtacttcttcaggcagatagaaaactagtaccagccagtgcaatggctcaggcctgtaatcccagcactttgggaggccgaggcaggcggatcacgaggtcaggagtttgagaccagcctgaccaacatggtgaaaccctgtctttactaaaaatacaaaaattagctaggagtggtgggacacgcctataatcccagctactcaggaagctgagccaggagaatcacttgaacccaggagacagtggttgcagtgatccgatatcgcaccactgcactccagcctgggcaacagagcgagactttgtctcaaaaaaaaaaaaaaaaaaaaaaaaaaagagaaaggaaaaagaaaaagaaaaagagaaactagtaccaggaaaacagaaaaaagaagtgatttgaataatttcagtatgattgagacatatgggtgaaagatcaccagagggaaaaatgtctagtctgataactttgaagaaaacatattgaccatgtctagttataataatcttttaataatctcacagtaatagaaagcttcattattttcaaaacagtttcactttcctgtcatctgtaattttaaaaacagctctctgagatggatataattatcctgttttacagatgtggaaatggaggcccagaaagatgaaatcatctgccccagctgtaataggactgcccatccactgagacatagtaaagtatcattaattaatcttttcatcatttttctatttttagtcatgctccctcactgcttaatttgtaagtaaatctaagataaaaatctatagtctcctcgtattttcatattttcatagctaaattgttaaagaggcgatggcagtgtactcatcaggagacttgttcttgcctcgaacattaaaagcccaatttaagactggagaatttcttctttgagggttttgtccacccatcataagagatttcaaactatgtaatgagtcattttacttttccccttttcttatggggacagcttctctttaatacaccgtgtggtctgccctcttggaggttgtgtcaccattatcagtagacaaatgctgccatgtgtaaaaggctatgccagtttctgcagtcctgtagttttgcccctcactagaacttcaagttgcttaacctaatcaggaatacgggcatctttacataggaagtgcacttcttcatcatatagacatagaggtcaggtattattatctttggcttcctttctcagaaattcttaaacatgaatgtctgaataaacatacagagaagaggttgggcgctgtggctcatgcctgtaatcccagcactttgtgaggccaaggtaggtggatcacctgaggtcaagagttcaagaccagcctgaccaacatggtgaaaccctatctctactaaaaaatacaaaaattagctgggcatggtggcgggcgcctgtaatcacagctactcgggaggctgaggcaggagaatcgcttgaacccaggaggtggaggttgcagtgagccgagatcatgccattgcactccagcctgggcaacagaccaagattccatctcaaaaaacaaacaaataaacaaaatatagagaagaacagaacaagaagtgttttgagtagcagaacacgactcacacagacatctaatatttagtcaaattgcttttatataaaagaaggtatacattgaagagcaacagagcctacctctatgactgacattttcaaagaaaatggctaagaatcactttgatggccaggcacggtggctcacacctgtaatcccggatctttgggaggccgaggagggcagatcacgaggttaagagattgagaccatcctggccaacatggtgaaaccccgtctctactaaaaatacaaaaattaactgggcgtggtggcacgtgcctctagtcccagctattcgggaggctgaggcaagggaatcacttgaacctgggaggcggaggttgcagtgagctgagatcgtgccactgcactccagcctggcgacagagcaagactccgtctcaaaggaaaaaaaaaaaagaatcactttgattagcagaaactatttcacttgccatcatagaaagctaagctatacttctgcttttctactactagctttatataaatgttatttttcttgcaacataaaagaaaaattgagtcatattgttttatttaatttttcttgaagaacacattaaattagctctcacactgtggtgtggacttctttctgttttccaccagtgttcttcagggtgatttttccagtgggcttgattaggactgtgtggatcattgtgatgctttgttctcagtggggattttccagcaaagatgagcttcattaaacaatgactgggttcatggatttataattggagtgattttcttcaaactgtaataaatttcagtgttacctttttctgaacgccctttttaaaagggattccatagcaagtcttctggaataataccttttatataattctttaaaaactgtaatttttacatactgattcctgttaaggcagatgttattgtatcaagaaaagactcaaattttgaacatattaaaaatagtgtttcttcagatctggtggataggtgatgctcaatatatatttgtttaatggaataaaaaaagaaaaatattaaagatcctaggaagagaaattaagttgcagggatatattgcttgtgtaacgtctgtttagcattgcaattttctgaagggaaggctatccacaactgttaattctgatctaaggaactatttcccttcttaacttctttgctaggttatctaaagggagatatgctttctcacatttgtttccttgaacttacttttaatgttgccttgtagggtcaaaactttagaaatacagctttctcaggaaacttggtcctcagatctttcagacattatcttcctttaagcttattgtcctcttgggaattggcaaaggattcccaccctttaaaaagataggaaattgtaaaatccacacttaaaaattaatctaaaattatttttcaggaagaatttatacaatggcaactaaatgccctgcagccaattatgtttatgattcctgcctcatctccaaatggtactagagtttgagtcatatgagaaaattaattgggttgggcttgattgtacatgtatatgtatataataatgttctggttataatgcagtttgcagtttttctagttacagctcaaggcaaagatgagaagcaacacctatgggcctgactgcctctgtccagtactaccatgccccatctctaactactacattttttcctattgaattctccagtccatgtagcataagtcccttcctgaactcagtttatttttctaaccctggctgcacgttaggatcacctgcgaacttctaaaagaattccaaagcctgagccaagcacctagaagttctgactcattgccctggggtaggactttggcatcattattgttttaaaagatccccagatgattccgatgtggaaccatgttgagaaacactaatctagcctaacccagtgaggttacaaatgaagaatttcaccagagaggtcaaagtacttgatttcccacagcaaagaaattccatttactgggttgaaaactcccatctgttgactttaaatccagcataacaaatatgagcaaggttttagaaggttttggaaactcatctgcagaacagagcaaatacaggcctatctaaaagcatacctcacagtaaagatggttaaaaaccaaaaccggaggaggcagagtactcttggtggggctggtagtggggggaatggatgattttccaaaagagaaaacacttgacctgggtctgaaaggctgggtatgatttaaggcaggcactattgttcacttgttagccccagggccatgctactccacttccttcaaggaaacagagggaagccggcaagtggctgcctggggtgtgtgtccacacaccatatagaggcagttcttcagctctgtcagccatggccaaagcaggcagtatttgaaccaccttggaccactcctgaggggcagcatcagacaccaggcatcctttcagacaccattcttggagtctcttccctccatcacgtaaacctcacagccaacagtgaaggcactgaactccttccaggggctgagcaggctgccttgggcatgctcttcttgaccttaaaatccacctgatagatctggtagggaggtagaaattttggtggtaggaaagccagcaattatcaggtcaaagggtttctgataaaaggagttattcagcagaaaggtaatcagattatgggagccttaagtgccagtttgggctaaattctctgagtcactggcagattgtaagtaggggaatgacgtaataaaaccactgcaaagccaggagtttgtgatgggaagataggaaatccctttctttttttcccacatgggaaataaaaatctaaagatgtgtggggaagctccttagagtgccaggactttcagtatcccccaatttatcattaggttctgtccagacctcgttccgcacacagtagcctagagacacctctggaataaggtgtgacaaaaaacaaggaaataaatttattaattttggaaaatgccttctttttcctaggcctccctcatagacattttcctgacaagtccccacttcaggtttcagaaagagatgcaccatcgtttggaattctgaagaaactcaagtttcaattgagctgagtctcagtggcatgtattttattacatctaatgccattttaatgtacttgaaactggggagatgagggcaattggtacacatgtgtaaaccactacaaaaagttcacctgagtgtagaaggtagccagtagcctaaaaaccctgtattttggaggctgttacttcataatctctattatgaaattgggaaaaattatgtaattatctctctaagatggtcttagatccactgttcaatagaactttctgcagagatgaaaatatcttatacctgggctgtgttaaggtttaaggacagcactggtataagatattttcacctttgcaggaagttctattgaacagtgggtctgagaccatcttagatgatacatgtggcttgaaacgtagcaggtgcaaataaggaactgaatttcaaatatagatatatttttatttcagttaacttgaatttaaatagccacaggtggctcttgggtatcataatgaatagggcagttatggagcatcattaaagtccccattcttctcaagtcccaaagaggtccgttcaggtaatttcttagcacctataatcacagtgggacagattaaattacttgtacttttccattcctgtgctttggaattataggctgtttctttgtcctggaaaccagatagtctaatgtttgtggaaatactacttagtagtgcactgcaattataatactttattgtaggaggatgcagccaggccttttttttttttttttaatcatctgtgtttttagttttaatcttaaaaggattataaaaatagtactgccttgtgggagaaaaatatgcttaaagtctatgagcatggagtggtagggattataaaccgttacaaacttctcctggaaattctggggaaagggaagttaaagcggccaatagaaatctcctaggagaaaacttgccctgaagggatgcttttaattgggttcagtatttatcagaagaaccctgcaaaagtggtttccctgaaggcatttggattttcccctgtgaataaatttcacccaccttggtcacctctgtgctgtattctcctagaaactcacctttatttggcatgctgtgacttaaatcctccaaaaaaaaaaaaaagcctttgaaaaagcctgtgggtttttttttttttttttttttttttctctaaaatgttaatttcctttctttaggcttgtgtgggctttgactggaaacttaatctgtgtgcctgggctctgcattaggtttcagtcattgaaatggggcttaataagaattacttgataccttaggagtcagacgagccttacatttatcttgggctcagggatttgcattttgagaggttgtgccagctgacatgagcctttacaggtttcagcttgttgcaaacctagttgggtccatttctctcacttctgagaccttttgctgctgccactcatagctaacgtgttttccatggaacactactccttgtccctaattgtcttctctccctacctcagcagtgacactacagacagccagtcatttaatacgagactcattccttaagaagttgggatagaactttaattacacaaggcatccaagccagcagtcagggccctttccaatgcgattacttttcaagctctgccctgcttctccttccatttccctctgggccttcgttttcagatctcctcagaagccgaggaacgcaggtccttttgaatttctttagatcagtgttgtcctataggactttctgcaatgatgaaagtatcctgtctattcctggccacatgtggctattaagcacttgaaaatggctggtctgacttggaactgaatgtatgatttcatttaactttagttaatttaaatttataaatccatgtgtcctcatggctactgtgtagctctatctagattatgcccttgacttttgaacaatgtgtcttgggagagttctcttggctctggccctccactttcatgaaccagctcctcccagtggggaaagaagaactctctttgacttcagaactgacttccttttattgctaagttagacaggctaggccttgagcttaaaactcttcaccaactgtttataccctccatacctggcctcaacatgtccttttttctctgtgactatatccttattctttatccagcaacagcaaatatgcattaattttctgcagataaggtttcctttggaacttaaggaagaggtatgaaacttggctttggaggacttagggataggaaagccatcaccaagtgtttatagagtaccaaccaccgtgtgccagccaatgtttgagatttggggaatacagagtgaattaaagtccatgtgtacaagctaataaacaagattctatcaacatgtcagcagataagtacagcgcgagggtctgagaacaatggtagatgcttgtaattttagaagcggttgtcaagaatggcatctttgataatgtgatatttgagcagtaattggtatgaaatcgggatgaagaaggcagatctctgggttaagcgcattctagttggagggaacagcaagtacagtgtcctaaaaacagactgtgcttgtcatttcctcccctcctcccccatggtttctcatttttgcttctctttctaagagttacatttataggcatacatttttacactggacatcacaagaaattgagcgagttcacaactccactggtgctggtaaaaagattatgctaagatggataaaagactatgaaacatagtcaaaatgcacttctcagtcacctctggccatacgattttacacatctgggttctcaccccagaatgagataggtttaatagataagattcagtgtggggcaaatctaaggtgccaaagttaggtacatactagaacttccataaagagttgtcttaagaaatagaaagcattataatttgactttgtagccaaaggtcattcaaaacatttcaaagtttagatcacttattccagttttatctctagtactaaatgttatttcagcacacaaatgtggtcattccccatggatggaaggagccagctgtgttccagaactatgttggaagattgcaccttgaagactgtgtgcatggttctcattttccatcttaaaatcactgctggaatctatcttgacttttccacagcccattgacaactgtcattatgtaaatactgtccttttttctcaccaactactgtggctgatgtctcccctccaaaatttatgttgaaacttaatccccattgtggtggtatcaagagacggagatttgggggaagtgattaagtcatgagtggattagtcccacataaaagggctggaggtaaccagcctggatccttttgcccttccattttctgctatgtgatgacacagtactggtcctctctagaggacacagcaacaaagcaccatcttggaagcaggaaagggggctcttacgagacatcagaactgccagtgccttgattttggacttgtcagcctctagaactgtgaaaaatttctgtcctttataaatcacccagtctcacatattttgtatggcagccaaacagactaagttaccaaccttagtgggattgctaggacttggaaaggagtagccttttttttttttttttttttttaaatacagagtcttgctctgtcgtaaggctggaatgtagtggcacagtcttggccatctgcaacctctgtctcctgggttcaagtgattctcctgcctcagcctcctgagtagctgggactacaggcacgcaccatcaagccctagctaatttttgtatttttagtagagacggggtttcgccatattggccaggatggtcttgatttcttgacctcgtgattcacccacctcggcctaccagagtgctgggattacaggcgtgagccaccgtgccaggccgggagtagatattttaatcacaggaggtagcatcagaaaagttgcagctactcaccacaagagagacctttatgatgtttactgcaaattgcatcaaggtcatgacagcaatgagtaatgcccaggaaaggcgaagatcaaccttacactttttcatctaactgcactgtgagaaaacaagcaaaattgcccagtttaagggcagattctcagattttgtttcaaatttcctgccctttgttgtcctttctagaagccttaacaatacttgcaacttctttcttttttttttttttttttttttacttcctctgcttgaaaaacatgaagggggaagtttcaaagtgtttggtgttatcttagaaaccaaagtgaatctgaatgtgtctttctgtcctttttgtgtcatttttcaaaatgaaagggacctttaagttcatcatgtccaacccatttgtttgactggttggagaacaggcacagagagtggttgggtaattgcccttgaactcaaagccccctcatggtcgattcagagccttctccactgcaacctgctgccattcccagcatggtgaattctcctccagtagaagtcatatagcaatgttttataattaacttttacgtgagcaaatgagctccaggagagaagattaaggaatattgctttccatatatctggatggcccagaacactttttaactaggtacttaaaaatctactacaattgttgttgcccatattcttctgtaattctttcatcagctgtgaatgaaagtacagcagttttatttccttgaaaagtaagccaaacatgattttatttcaatattttagaattccacaatcttaagacacatcattgccttcccatctctgcatgtcaaacttactaattttattagcatgttgcgaaataacacactaagtgtctcaaagccaaagtagatcagctctcgcctgataaatgtgcaggagtaagcagaggatttgaaaattgaactggattctcaagttactgcctgtttgccagacctatgctggttatgaacaatatttcaaaaccagattatttggttctagatcctaaacactcttggcaactttattgtaacgatgattgattccattgtatatttgaaagcatcagggcacagtggtaacaaaaaattattatatttcaatttgtctattcattcaaatttcctgaaaggttttttagaagtcatcaaactgctacattctattgatgagtaggaatagatttaccaaactcatacttatcttgtcatttgtttcctgcaattttctttggtgtgagagagcattgcatggaatgttacctttctagcaagtgaatgcttgtgtggcattttttactgtctagaggattttcacaggtacttcaagcatgtttgctcttcatcatgatcctacatgggacgatttcataaatcaggaaatggaggtttcaagaagttaagtggcccacagctaatacatgtaagagcctgaattcacactcaagtttttaccttaaaactcttgggcttcaccaagctgaccttattatatatgtctcctaaaataagtgaagtaattacaaagaaccaaagcttttgtctaagaaacttattgcttccccaccccttgtatactttcttcaactcctagtagtcacacctgtgtctttgccttgtactggaatgtgtgtaaagttctactcttaaactttttgatggaatatctatttcattgtggagtatcaggaaggatgagggcttgtgtgtcaccattggctttgtcttttatttgctttctctcattgatatgatatgataagttatttcatctctttgacccttaatttctccatctataaaatgttaatgacaaaattgcatggtggttgtgataagtaaatgaaataatcatcacagtacttaatactggactaagcatttggtctgcattcgataaatcatgatcatggtaataataattattaacatcacatagatctgatttctaaagtagatgtcctctggccttgaactgaaatgtgattatacacattagagaattacatgcatgttaaaaatattcatattagagagttaaatcatgactttttgcattctagttaaaccctaatattagaagagagaattgaatgtgcaggtgaaataatcattaattgtaaacattcaggtggccacaggggcctggcaggggagtaggtgacatgaaggagtgtcagggaggaggcaaatttgaggacacagagactttctcaagaggagcatctcagctcacagtcagctgactgttgtcttgggatggtgtgggcccactgtttccaagtcttttttatttctttaagtggaattagaaaaccagttttgcatgtgaaatctctgaattttaaaacttggtttatattttaaaaagaaaagagttcaggccaaacagaacacatctgtgctctgtgtccagctcttgtacccactgtagcaatttctgctttagcttctcagtctgtgcccaagttatttggttgttagaaaccaagcgccttggacctcgttatattactttttaaagggatgcctttcccaaatatggtagtactctggcccttttccagagaaaatatggaaatcatctgttttgaccaatattttcacatgtttaataaaactgtaattgaaaaacctttcaggtaccaggcatgcacaagaaccccgcagcatattttgaaaaactgaagcaaaagcctccacggagaaatttatcagtgaaaattctgctctcacagaacattgatattcggaccaaatcccatgcttagttgaggcaaatggttcatttcaggggctgatttttcagattctctaatagtcactatcttttaaaaatctgttcttaccagattttgtgttagtttctgcattttccattaagctgcctcagtactttgagataaagaattgtttaaatcctaaatgaataacttaattaaaaagcacatcttcatttagaccatccttatttccaaagctcttttgatgaaaatcatttcgtgcatttttaaaaattccctagaagaacttaaagatcttgaggaaaggaccatgtcttatcctgtcccccttccctcaagggtttaaatatgagggctgtcagaaagcagcacattttcgtttaggttgactaattttgctggtaagtaacaaattactttagttgaattggaatgttgtaaaactccgtcagtcgtgtatcattatcttgcctctatcagtctgtgccatttaccaatgttttgaccatcaccaagagagttatttaatcatcttttattttcaataataaattatttccttgttgctacagcactccaagtcctgtcaactgagggagaattgttttctcagttgctgtcactttaggtaaagtaccaactttaaagcacttctcagcagaggcataaagttattattttgagagttcatgaaatagtgctccattctactctttcacttgatctaatataccatttgcatttatatggcttaacttttttaactggcttcctgttcttctcagccccaaaccctacattctggtttttgactcatctcatagtccctgcagtcagtctttgccagataaaggcactgttaaagtgagctttatcaatgaaaaacttaagaatttcatgtattgatgacagtatttactataaactgcttgcttctccccagctttcagaaatttgttttattcactgggtcctattagagctgaaagagcatgattgagaaagttacaattgtttcagctttttgaatatggcacaagtgctagaattctgaaatactgcctttggcaacaatgtgtagatatttccacctgcaagagtcattttaaatgtttagattttgtctcctgttatgtggcctgtatctcagagaggtcccctgccactaaaaacaaaaacaaacaaaaaacagaaaaataaatgaaaattcagcaagcgttggggggactcaaattgtacttcattcttcaatgatacaagaaagcaagaaaaccaagtatgcatttttaggatttatttggggtcattggggctggtaagtgttaaataggaaaggatgcaattgaaattccagctcagttattttatgtttgtcactggagaaagccaattatttttccgttcagctacagcttgtttcattccgtagaagactaaaaaaacttccttgtaaattgcatttaaaaaaatttgagtttaaaggtacagccaagatttcaatttaaagtacctcattggatgaattcatttgagacacaagtaatcattccttaatcccttaatttgtttggtaaatacaaatttatgtttatgcagttttcttaaagcaatcatagcaaactactaaattcatgagccaaaatgctagtgaaactcaaacctacaaagctaaattccctcagttgaacaagtccaaatgaggaaatcacacacataaatgcataaacacacacactcacacacacacttcccgtatcagctctgtctccatttctgacctcatgtttgcatttaaaggcaagtaactgattcacatgaggttgccgttgttaatgttgcctctcaaactagaatataagccataggagggtagggaccaacctggtgtttgttttagatgtcttgttgtgtggagagtatcccagacatttgatatccttaattgttggccagatggtaggtagtttcagtgtgaaaatatatatgtatgtgtgtgtgtgtgtgtgtgtgtgtgtgtgtgtgtgtgtgtgtgtatagtactgggattacaggcgtgagccaccgcacccggcccgtactaggtattttactagaattatttcctgctctaagagattttagagtattgattatgtcattcttgacaggttttaaaaactatattagtattacaaaaacatgtgcatgaaaaggaaaattgatgcttttgagcttatctctttattttctgcccacatggtggtctccctattaggtattgtttctccacttctgatcctggtgcccagaggctatgtggggctgtcacttgaatgaaagctgcatgcatctgccatgacagaatctgccttgcatttgctcatttataatgaaaacattttttaagtacagaaaaataatagaaaattcaaaagtaacagaagggtatgaaataaaaagttgcttctcaacctcagttttctacctatttattttccttttacagggccaaataatgtttgattctcatgtccttgcatctactcccagagaccgtctaaatatataagcatgcatgtgtgtgcacgtgtgtgtgtgtgtgtgtgtgtgtgtattccctttaaaaagcagtaacaggccaggcgtggtggctcaagcctgtaatcccagcactttgggaggccaaggtgggcagatcacgaggtcaggagatcgagaccatcctggctaacacggtgaaaccccgtctctactaaaaatacaaaaaattagccaagcgtggtgttgggcacctgtagtcccagctgctcgggaggctgaggcaggagaatggcgtgaacctgggaggcagagcttatagtgagccgagatcgcgccactgcactccagcctgggtgacagagcaagactctgtctgaaaaaaaaaaaaaaaagcaataaaagcaataacaacaaaacagaaatggtggtgtgtcaaccagggttccagttgcaagcagatggcaccctcaaattagggagatttaaggagagtttagtaaaacaagtacttacaaaggtatggatagagtcaagggaaaccaccacaaaatgggagaaaccatagtgcagatacttaggactagtaattgctatgttgacttgctaggcccaaagtggcaaggagagggaagaagtaaatcttggaaatgacctcctgaagagaacctgtgacctccaagtgagggacttggccagctggaaaagattccacagagggagccagaacacagataccttaaatgtgctcctcattgcttcccttagataccgctgggtcaccccattggccaaacttactggaagcttgagggcaagagagccggttgatgtagtccataaagatgagcctcctggggcagacagtctggtgaccaagggtggagaactgatctctaagggcaatagaagacacccagcccaagtaactctatacattggtctctaccttgcttattttcttgaatgctatagcctgggcttcaacacttataaagatagccacatggagctgccctctgctttttagtcgttgcgttgtgttccttgtttggatttgtctaatttattttactagtcttctcttgatgagtggttaaaaaaaaaacctgtttgtccttacaaacaacactgcagcgaatttatcaatgaatatcataaatttttagaagcgaaagtgcgaggcaaaaggctatttgcgtttgcagtgttgattgatatcaataacatgtactcctgagatgttatacctgtttacaacacagcattatgagaatgtttgtttccccatactttacccagctcactgtgttatctgacttattgatctttttcaaaatgagttaggtgaaatatggtatgcatttttaatctgcatttcacttgttagcaatgaggttgacatgcttcgcttttagagcttattctctggtgatatgatcaggaagtaatatttaaagtagcgtttttttaacacaatatagagaactcatatgatttgttatttgtttccaataagcattgataatgattttaaatggcattaattcttctggcacttgtagaatacttactatttaaaagcaagaattataaggcattgtcatttcacagagattttagagtattcactttgtcatctctgaaaggttttaaagtattattactacaaaaatatttgcataagaaggagaattgatgccttcaggtcacttgtctctgttttcttcctgcacacgccatagtctccctgttagctaaatgatggtatctctagtattgaccttggtaccccagagaccatgtggactgtcagttgaaggaaagcccgatacctctcttctctcaaggtataattagataaagcattagggttcaaacacatttttaaaaactaaaaagaaggtattgtattagaagttccaattagagtgtgcaatagatgttcagcaaaaagaactattcctaaaatgttcctatctttggtttaatcacaaggtgtttgtttggttggttggttggttgtagtaattggccaaggtatctgattggcttggggatgtctttcctgaagaattatacagggaatcctctcagattgcttgactttcttctttgttctgggtgggaggaagtgtgtgactagccaatagccttgtcccaccttgtctcaagggtcggagctgctgttgctagcatcacaggccacagcggctttctgccagatggctgcctcagtatctgactcggaaatgctgcaggcaattaaaaacctcctttcagagaacatgtctttcaattctgggcccatatggtgatcagggcctctgggtttgcaatcatttaagaggtcaggctcaagagaaaagcatatggaaagaactggaagatgagaaatgcctgtaaaaaggtgaagaataggtatttaatttcactaactccaaaatgactggagaaagggaaacaattattaaaaactgggttctccacagccttcccactcaacatatagtgggctggcatcacccagggcagcagctcccttcctatctgtaaggtcagtttcgtgtgtacttggctaggttctggtgcccactaatctcattgttgctgtgaaggtatgttgtagatgtgattaacagctaaaatcatttgactttaagtaaaagaaatcattctctataatgtgagtgggcctcatccaatcaactgaacagccttaagagcaaaagctgaggtttctgagagaaaaaatactgcctcaaaactgcagcattgatttctgcctgagttcccaggctgccagtctgccctataaatttcagacttgccagcccccacaataccactatgctacacctgcaggttaaaaatattcccaaagtacttgtgtattaatatttgagaagcagtactctaaaacagtaaattctatccaccagtttccatggattattctttgagatgttatttaattgtgtcaatttcagtggtcttactatgaatatataacactaatcaagacatccacaggtatttgtagaacaaataaatttctgagtttccccccacaaaaaacactccagaaaacaacagtcggtagatacatgaattcaatgatacacgaatgcatgaattcagtgatacatgaatgcatttctgacaagtgtttatggttattgttaaaccttgagattttacctaatggttcagctaataatagacactatttcaaagatttggactaaggtcatattcagaatttctaatatttatctgaaataagtctaaatcttattaggctgctcatctgaccctcaaagacaatagtacagttccagaaatagacacagctaagcagtcaattcatattctcaagacctggaacctctgtctgtaggcagtgagtgtggggaaaatgtgagataaaatggggaaggtggtatgacctagagtgaaggttttgatattactcatgggcttatttgaagagaagtgaaatattatgggccatgtgatactatcatatgctgagagatgctacccatgttcacttcctttagtggatggctttctaggtgacagatattcttattggaacttctttctggagaactttatgaataacgaatttgcctattaggggtagaaaattctctaaagatggttagctgctcacagagagtctataggaatcgaagtacagtcatctcttggtacccatgggggattggttccaagactcctcgaggagaccaaaatctacagatgtttaactcccttatataaaattgtgtaatatttacatataacctacacacatcctcccatatcctttaaatcatctctagattacttatacataatacaatgtaaattctatgtaaatagttgttatactgtgttgcttagggaataatgacaagaaaaaagtctgtacataattcagtacagccacaatcatcaatttttttaaaaaaatattttgcatccacggttgatggaaaccgcagatgtggaacccacagatacagaaggctgactatatactgccttaatataagaatatcttaactagagagacttagactaatataacaatctggattaaaagtaatgttgaagttgggttagggtttgctatagggttaattaggtgggttttgtatcgttgtttagaggaatatctttattcctagctatgcacatgtatgcacttactttccttcccattcctttggctttttaaacattatgtattaaacgtaaggagatgttgtttgatatctgaggtcgtggctggtaacatcttttcctgtggtttggagtgcacagatgcaatgtcccatacagcaaatgactgttacccttccctcccactggccctcatcccactctgaccagcagtataccacttagcatgttattagtgactcttgaggattccggggttggcttgggatgccttaactggatcttacgggcctcagagaatctgcaaaccttctcagatgatctacaaattttgtatttgtttcttttccccaactccaaagtgtgttcataaggcttttatcaaacttaggtgactccagcaaaggtttagagtagctttgccctctgaacttaactacctattccaccagtacatatggtatgcataaaaggacctgaggacctatatcatatagaggaaaagaatactggtttaaaacaaaggttggaatgtatatgacctcaagggctacctggaattgttaaggtggggagtctcctagggtcaactaatagggagtcgatggctggtgctgaacatgtcctgcatacaggcttttgaaaaaaaattctggttaagctcttgcagtggtagcttctgctgtaacaaggagaaaaatgtggcatccctggctgggttcttgtgaagtaatatgctgtatcttaggcaactttcctcatatacagtgggtgctcagcatgtgcaaattcttattgtacactgcccttcccaccatatgcctgtgtctatatgcagtacagttgcttgtttggcttttcttcaacattcaatggaaaggctttctcttgttgggtctacccatcaagtaacatgtattatatctcgccaggggccccgttacagtggtgctcctggagctgtgcaaattggtggaccttctctctctttctctctcctccccctccctccttgtttcccttcctcccttccttcctctctctctccctacatccttcttccctttctctccctttctttcttctaatggtccttttttcttttccctgttgattgtgttctgcaagcatcggacttaaaccacttgcatttgtcaatacatctgtggccaccactgctcccagcacccatctcatctgttttcatttctgtcttatctatcgctgctcactcctgtcactattctcacgtttctaaggttttgctagaaaaggactggccagcacggagaagaatttctatctgaggtgtgaaagagctaatcacctctccttaggtgcatgtttttcacaagggaactaattccagctatatccaggtgctgtcccctcagcagcataagttgtatatgtgtttgtggtggtggggtgggagtgggggggttgctgttttgttttctgtttattgtgttttttccaactaactataggtctgggttctcaaccttggttccacattagaatcatctgggcagcttctaaaaatcctgatgcctcagttaccttccagaaaaattaaatcagactatctgggagtgggaccccttcagtattttttaaatttcctcaggtgatggatttcaacatgctctccaagttgataaccaccaatctaagctaaaatcctaagatgttggaagactgaatttcaagtaatggaaatttggttttatatttacaaacaacaaaccttcctaatcagcaaatagatgcttgtccaaaacatactctatacaaaaaatacgtatgtatgaaataaacaaaacgtggtttcactttttttttgctttaaacaatgttaaagaaacctaaagtgttattagttgtttcaaaaattgatccaagtataaccatgttagaaaaaaatacatattaattgttgtgtttctcccaaatttcacacagttcagagagtatttctgcctatatttttagctaagcatagagctcttggtctgggagacactgagaatttcaaaatagcttgttacctaaaaataaacttcctgaaatgaacttgaggcccgagagggatgaatggctttatttttttcttctatatttactgttaccacaagaaagcaaatcttaaatttatatacgtttatatttttagagacccaggaaacaggtgctatgcccaagctacaaagacagttgcagggcaaagtatctatgacagaatcctaaaattcacaggacagagagtgactgtggaaaggcattgaaagtgttcctctctaggcaagagcggagggaacatgaggcttttcttaggcctctctaagggttatgccttggaaaagtacctcacaactttctgtggcccagcaactgttccagcaccccatgcggtctaagtgcttaatgtttcttagtctagcatgtaagtattaattcatgtttgctggttgagtgcctagtagccttgtcatacttcactgactgtccaaactcatgtcttaaacatcatcaccatctcattgaggaagaaaatggggaatggggtgttacacctttatttgaactgcccctagtttgcagcctgtattttgcaaagaatagtctgtcttccatattttattgaataaatgtgaatgaatatcacatttataatcacattcctctctaatctgagtgaagaagttctgtatcctatcctacatggcatcaagggccaaacatggactccttgtattcatcctgtgttcactcatttatccaataaacatttttgtatgcctgctatgtgaaaggttctcttcctggcactggagatatagtaggtaagtgaggtggagaaagtttcatggagcttacatttttgtggatagattattagcaagtatgcgatgcagatagtttgtgcagacaataaataaaacagagttgctataggatgaagaggtggcatttgatcagagatcagaaaagtgacaggaagctaaacaaaggtaatagcaagtgaaaggcctgaggagggaatgaacttggcttcttcccagaagggggcaggagattggtgatggtggtgataagggagaggtacagaaggcagatcctgaggtggattcagcttttatttgctgcgatcataactccaatgcctcaccaatgcttgggattgtgtctaggaggcactcagtaagtgttagttaatcaattgatttgcctcaaacacagagagagatcagtagaactagtcccttgaaaagaagacccttatagctctttcaggagtaggtcaggaaaatggcggcaaaatcttgtgcctccagcaacggttcctcctttggtgtggcacttcatgactctgtgaggttatagcctccctgcccagctgagcggtgatgctcgcctggctcccacatcctctgtgctgccctctattttgggtcaccctgacttggtctgtttcctgtcttattcaccagctaaactataatttccttaagggtacttttatttgtgggcccagcactccgtactatgcagtgggcccatctaggtttctttattgaatgataagatttttgtagaaagtggaccttatgacaaccattgacaaaagcaaatggctactcaaccaccccaacccctcaccacccctcaccacggtacaatggattttattacaaattgcatacaccagataattctaatctgatgtgaaggaattattttgcctttcttcagattcattctcatgacatcaagttcatttgaaattgcataacatcttcaggaattcattggcaggctgcctggcagttggataatcatttaatatatctttctctctcctcagttaataacgacatgatagtcactgacaacaacggtgcagtcaagtttccacaactgtgtaaattttgtgatgtgagattttccacctgtgacaaccagaaatcctgcatgagcaactgcagcatcacctccatctgtgagaagccacaggaagtctgtgtggctgtatggtaagcaagccttttaagaagttattctttcttttcccctttttacataatgtattctcatagtacacacagtcagtgtatctctgtctcctaaatgtaaacacctgttccatttccctttcctttagaccatctctctttcgattattaaatgtagtttctaggggtgttctctgcatgtatgtgtacgtttatgtgggtatataaacgtatcatgattataaaatgatcatgataaatgtaaagatcataaaatgatctttaatataataaatctggaaactctttcttgtatcaagaagagggatttgccgcttagtagtcatttaaccgacacctcctcagcaccccatagtgagaccaggagctttgttctcttgaggcaatctcaggtctggaagaagaggtgatgaaaggttggctgttggaagagaaaactaccagccaaaaatggggaatctacttggagaaccacaaaaacaacctgtttttttagtcagaaattctggttatattattcatataaccattgggatagatatgacttctttctctcagctcagaactacatatttcttttttttttttgagatggagtcttgctctgtcattcaggctagagtgccatggcacaatcttggctcaccgcaacctccacctcccaggttcaagcgtttctcttgtctcagcctttcgagtagctgggattacaggtgcccactaccacacctggctaagttttgtatttttagtagagacggggtttcaccatgttggccaggctggtctcgaactcccgacctcaggtgatccactcgcctctgcctcccaaagtgctggaattacaggcatgagccaccatgcccgaccagaactatatatttttatcggatcacattttctcctctctctctctctctctctctcattccctccaactcatacatacatctcaaataataattatacatacacagtggatactcatgaatcatttgattaattcatggttatagattgtgagcatgaacaagaaataaccttgatctttagaagagttgtaattttacaaaagtacataaattcattaatgagatatgacattttgcagacttattctgatgtttttaatttattggccattttaaaaaaagtaacttatgtgtctcctggctagttgacaaacaagaatataaacccaaatatctctcccccttttttgggaatgagtcatttgagacccctagaccatgtaaagctagccttgatgatagatctggaaaccttgcaaacttctgtacataccacgggatgaactggtttcttaagaactgaaggaatgttaacagcaaagacttgtcatgacatacttgccaatatgatatgatacctgtccatgtccacttctaggtaacgctttcaaagaaaggatttggacaaagaatgtgttcagaggagagggaccagtgtggttagaggcctagaaatcatgctgtctgaggaatggcctgggcaattagacatggttagtacagtgaagagagatcgtgggttctgctgatgaaattgaaaggctctcaggtagaaaatataataaacatattctgcataactctgaagggtagagggaggatccataacatttgcaaggcaggcagacttgtgctcagcataagtttagacattttcacaatcatggtttcccaacagcagaacaggcttccttttctgtaagcaccaagtgaagttcaggagaggctggatgaccatatgtcaaatagaatgcaggaaagattgagacaccagactagatggcctcaaagcttccttccgtggtttcttaaatatctacggtggtgtgagcacttgcttttgcaacccaaaaaggctcttttaattaagatttttgttttcctgaccagtaatacaagcccaaatcattaaatgtgaatcaagtctctctagaatagaggctttgctagcctcaaaaaaatgtgagcatgtcgaagagaggaggcctccctgtcttttctgtgtcccagctataaagggtaaatacaatgaacattattttgacctgtgctggccaaagaaaattctcccgtgaagccaggggtgttgataatgagaaggggaagtatagggtacgctatagtgccctccttgatcctccttcatgaccaaggcactcattccctgggagtgttggctgttgaaggatcactgctgagccttccctccagtgatgggagctgcctcattcacgttggacacttttcatgggtagccatcatcccatggctagttgatgcagagaaacaaattcctggttattttgccataatgtggtacatctttgaaggacatcccattttcagagtttccaaggcattcactgaggcctttgctgcaacctgcattatagtttagctttttccttctgtgcaatactgttgcctttagtcgcttacagatgcatctccaaaaacctcctgcacagaactctcacagcctcaaggtctgtttccaggaaacctaaactaagacaggaggctattgtaaaaatagccagtgtggaaactgaaaggctctactatgattgtagatttcagtgttgttgtttttttaatcagttttagtgttttttcattcattcattcattcattcattcatttaactaatgtcagttgtgtgcccattccatataaaatgcttaagctgcctccaaggatagaaatattttataaccaaaattattattattattatttttaaattgagagggagtctcccactgttgcccaggctggagtgcaatggcgtgatctgggctcactgcaacctctgcctcccgggttcgtgcgattctcctgcttcagcttcctgagtagctgtgattacaggtgcacaccaccatcacgtggctaattttttgtatttttagtagagatggggtttcactgtgttggccaggctggtctcgaactcctgaccttgtgatccgcctgcctcggcctctgaaagtgcttagattacaggcatgagccaccgtgcccagcctccaaaattaattttatcatgttggttcttctttcagtggaaattgacaacctcttcagtggctcagagcaaatgttgcaggacaaaaaaagaagtccgtatttacttctttgtatttacctttcctatgctcagctatatccaaaaagagtttgaaaagttagctgtgcctggctgttacaggagtgagtggagaaagcagttaagggctttaccaggtctcaagtattacagttgttttctctctgtgatgttagttctctcagtagctaagaggtagaaaaccggaggctctggaagagctgcccaataattatagagcagctttctttcatggctcacagttccttcttaggcctctataagcgtcacaaggaaaagagaccatgcctttctgtgggcacagcataccttcgttttattacccaaaccaaaaacaacctacacacacacacacacacacacacacacacacacacacacacaaaactgtgggggcagggaggaaggtgttcttgttccatgactacagctgatttgaagactgccaagtagctttggggttaaagatgggtagatttccaaattatacatcatttgttgtatgatcatgccaactttcatttagtttcatttggtgtcctgatagccaccctcaaccaattattctgcttgtcactcttcctgtcacagcagggaccaacttagcaaagccttgctcctcttgtgtctttcggaattctagtttaagaacccttgagccccttcacaagcagacacatgtacctccactggagtcaactctgggctgcatggatgttgacactggcaccattcctgcctggattgtcctaacccatacccttgcccttatccctttgtcaacatattgtcctttaatgtccttgacttaagcactaaaaaagtggtattggtcaaagttgctctttctctcatggggatggccccgcatcttttataggtgcaagctgtgtcttagctgcttcttgcttctagcctgccttccgttttccttgctgtgagcagtgagcctttgtgcatggggcagggaggattaggggaaaattggtgagtgagtacatgcatgcattggctcatgtgtgcactcagaatcttcatagaagattactctagcaaaactgactggaccagattagcccttccttccgctccctctctagacagagagaatgcgattcaagacaacaggtattttgcatctaaaaaggacagaggtgaaagggtggatgtcagactagccttgttggacagtcatccaagatagtatgttcatgagggagcagagggaggtagatagagaggtgatacccttttccaagagagccaaaatgttcttttgttcaattataatagtgggcattaatcatgttgtttaaaaatctaatgtacactgacggccaattgagcatttcctagggcccaaggaaaatgctatgtgagaaattctctgagccctgggctaaattagtcttcaaatatgtgctatgaagtgatactgtcaaagtagttagtttatgacagcataaaatatttcattgaactgtaaatgaagaacaccctgacatccctttccatttcttttatttatttgttttttttgtttgtttgttttttctgaattgctcctttctgtaatttgggaaagactgcagttctttatctgcgatgtttcttcccgtttttctcagcagaaccagctgttgacaaggagtataccctttacacgcaatgctctggggcccagcaaacaaaaaaaagaggaactgtgactatttccccaggcatgctctttgaaaacagtatagctagacaggacagattttgccacttaaactaggggtgtgatgtgaggtttgcattacattcaggatggaagatttaaaattatcctgagtacctaggaatgttctttttttccatgtcttcccctttaatgatttaattaagacttaaatatgtaaagttctccaccaggactgccccgtggaacgctgtctgctccaggtgatgtttataatcacaaatgggttccaagaataaacaaaggaaaaacagaaaagagtagaaaagcataggagactataggacagcctgcgaatgctggagaacaggaaccagctgccgttgttaggaacaacttcatgaaggaaaagtattccagattgcctttctgtctggaggccatattattcatttattctctttctctctctccctctcccctcgcttccaatgaatctcttcactctaggagaaagaatgacgagaacataacactagagacagtttgccatgaccccaagctcccctaccatgactttattctggaagatgctgcttctccaaagtgcattatgaaggaaaaaaaaaagcctggtgagactttcttcatgtgttcctgtagctctgatgagtgcaatgacaacatcatcttctcagaaggtgagttttcttctcttaagggtgtgggacctgagatctgtgccaattttttgtatccttggtctgcagtgtcatagagcacattcctcctgtggtggattgcatacagtggattaggagctcattcagctggtggaaagaggggcttggggagtagcagggtttgttctggttctcatcaaatatggttgactggggcaaacattattatttgtctttgacaaatagtttctttcacctagagcagtgtttctcaaagtgcggcctcttgagcagccagcatcagtatcacctgggaacctgttataaatgcagattctcaggccccactaaatgagaaacatagagggtgaaccccagctatctgtattttaacaagccctcccagtaattctgtgcagctaaaatttggtaactattgttctaaagatttggatggggttgtttaatcttggaggaggactttctttataactgatgttgtttcttgtacatagtcccaggatttgtctttagggtacttgtcatcgatcccatttgagagaaacattgcaatacagagaggaaataataagccaaagtttacccctagagccaggagaagagtagattagatactagcctccatctttgaagttcagcgtttactcagcttgaaaggaaggcatacactattccctcaatttttaataagaagagaattcagtggtttttaattacaaaagtagtatatgctcgtcatcaaaaatttcaaacaatccaacagtgtgtgaaaattaaaaatgaaagtacattttcgtcctcccctcactcccaatgcaacagatcatctgtattgacaatgtattagatgcacacacgtctctatcattcattcatattatctcccactccatcctctctcccaatctctccctgtcttcctttctctttccctcctttcatccatctgtccatccttccatccactcatccatctttcagtacaactatctgatcatactataaatattattttgcaacacttttttatacccaaccacttttacaattccttctaaacaagatagaacacatagatatactgtacatcttttaatttagtctcgaatttcatattatctcccacgatggatcttatcatgtccctgttgatggattgtcttcagtttttccacttaatgctacattgaatatctttgtaaaaatatctcatgcatttgtgctaatatttctgcaaggcagattgccagaagtgaaatttctagattagaaatatgtgtattttaaatttgaataagcactactaaactattctcctcctgaaaaggatgtaagcatatggatttccgtgtaccttctccaacactgggaatggataagtcttttaattttaccagcgtggtagtgtaaatgttagtttagtcaacaataggtctgatttaattaaaaaatctttttgaaatacaaatgctggctctacaccctatctctgcggccatgtgcattccacctgcgagaagctatgtgtcctcgtgtttcgtgtttggtgctcagtagcactgcagatccagcttgttctcttcctgtgtccttcacctactgccattctccctatcttcctgtccaacatcccccaggccaacttctcagtgaactgaaggcaggcatgcacatcttgtcagggcaacgctttccagattactcttccttcctatgttctcatcctcatcctgtaaatggtccatttctctcgttttcttttctggttgttttttttttttttttttttttgacggagtctcactctgtcgcccaggctggagtgcaatggcacgatcttggctcactgcaacctctgcctcccaggttcaagtgatcctcctgcctcagcctcctgagtaggtgggactgcaggagtgtgccaccatacccagctaatctttgtatttttagtagagacgagtttcaccatgttcgtcagtctggtctcgaactcctgacctcaggtgaataacctgccttggcctcccaaagtgctagaattacaggcatgaaccactgtgcttggcctcatgttctttatgtgatttgagttaggagggaaatctaaatagtttaatcacatgaaacatggtaacacctgatattctgacttaccaggtcagctttcttcaagtagatcaccttttaaaagaaggcctaggctaagccaaaggaattaatctctgacagtagaatacccaggcatgtttactagcattgaagaaacttttctctccttctgtataccagcttgtctacagtagacaagtttatttcctccaaaaggacaaaagttgataaatggcctgcaagttggatctatattttatcattgaatatctttgtcaaaatatatcatgcattttatattttactatgagcctttcagatactaatgacttccattttcagagtctttcaactcaagtgatcatcatgggcatccctcatatttttcctcttatttattctcagactttcttatgaagtgagataataagcataaagacaatttctcactgtacagtacaggaagcctttcacagctgacgactcaaatgtctgggtgatttcagagtcttctaaaatgctccagaaggtagggggtgtttgctttttaagcatctcttttctgtgtggtgggatatttcttccacctaaaacagcagacattaggagcaacattttatattccatttctccccttattgccaccatctcttctttatcttgaggaatgaaaactttttttttttttttttttgagacagagtctcactctgtcacccgggctggagtgcaatggtgcagtctcggctcactgcaacctctgcctcctggattcaagcaattctcctgcctcagcctctcaagtagctgggattacaggcatctgccaccatgcccggctaatttttatgtttttagtagagacggggtttcaccatgttgatcaggctggtctcaaactcttgacctcagatgatccacctgcctcagcctcccaaagtgctaggattacaggcatgagccaccacacccggccagaatgaaaactcttaatgttgatttgtctactccaagtccaacaaggtggtgaacacaaaagctatgaagtgcattgtggctgtattattagtagtacagtactcttgttggcaagttcctgatctgcagctacacaatggatgataattatgtacatctaccttttttaatatgtaagaaaaaaaagttgagccacaagattttaagtatggatctttatttctagtgctactattaatgatagttaatattcagagaaaacatactgtcgctgtgcagggagctcagccctttccaagcatgacctcatttaatcttatagccaccccatgcgagtaggcactgttaggatccctgtttatgcatgagaaaaccaggcttagagaaatttaacactttgtctacaatcaaacaactagtgggtatcaaagctaggatttataatgggatatgtaaggcactaaaacctgtgaaggttttccttttttccttttttaattctttccttttttcctctttttatttccttctttctctttatatctctgtatgtttccaaagagataatatatgcatatgataaaaaattcaaatgctagacaaattcaaacatctagacaaaatggtgcagagatttaacatttgttccttttgttgttgttgtaaatgaggcttggttgtctgtagaggcagaggaacacggtaacatcttgacatcagacactggtgtcatagatgccctttcctcagaggactgagatcatggtttttagaatgaaagagttaaagaaaccttgctgtttttttctttgaaccgggtacctacccttaaccctggaatccctcagtggggcctagtgccagttcccctgcctccctacagtgaccaagggcaggcaggggtcaagaaacaactagaatggggctggggtctgcactgcacaactgttctctcacattcatgcttccctcccagtctctgaagattccctcctgccagaacattttgtgtagaattctaaggaaatcagagtctatccctgtactaaccaacatataaaattccaattagaagagaagttgtttggattggtcatgatggatggcctggtgacagctgtcagtcagacgagacctgatgggcaccaggactgaaggcagcagcacaggaggtaggagaggaaggaatcctgagcaaatagccatgctgtttacttgccaatgacatccccactttgcaaagacatgatatggttattgatctctcactgaacctgtaagaatcaaacacaacaactcagttttattcatttcataaatggtttccaagtgcagtcagacatttaatttgtggaacactgagcgaagaggtgatttctgctggtttaggtaagagagaaacggtctagtgtaatactcaagaatgagctagatctcctggatttaaggcttattctacagcttattagctctgctatgttgggccagtgacttgacatctccatgcttcagtctcttcatctgtaaaatggaaatacaaagcgggtgggaggtgttgtgaggattgagtagattaatgcatgtaaagtgcttgcaacgttgcctgacatgtcactgtctgttagctgttagcagtagttgggctttttatagagggctggtgacttgtgcttgtctgaatgcaggaaaccaggcctgtgtagccttcggtctgttctaacactgaagttttgtagttgagtgctgactgtggtgcataaactgagcatttggatacctacatatcacaccacaaggttttggaggggctcactttgctttaatccctgtttcatccagtttctctttttctccacatgccttcacagaggcaaggggagcatgctgagtctagaatttctaatcaaagctaaccacatccctgtcattgttggataatattacaaattagacacgttgttcctgttttgactcagaatcacagcaggaagcagctaaataaaactgaaacaacccacaagtgcctttcacataagtgattagggtaatcgcagttctgtacttgccaaagggattcattccctcttcattttttccatggaaagcttgctttgggccacaaggccttctctttgaatgactgcgccattattggccaagtagtgctgataaatggtacctgtgggttgttgtgggatttaaggagatgatgcttgggagcgcccagcacagtggctggcacacagtaggtgcatcctttcttacttcttcttcccctgattaacgagaacactctacaccaagacacatacctcttctgaacggtataaaccgttgctactgaaagtgtctagaccagcagcagcaggatcacccgggagcttattagaactgcacaaccttgggtcctctggggcctattgcattagcatctgcctgtaacaaggccttcagtgatttgtttgcacactgaagtgtgagaagcactggtgtgaactcaccaggtagggatggaaccagagatggaggtcttattaacttcatgctggtaactccctgagctaatgggcccatgaggaataaatttggtctaaagcctggtcatttggaaatgaactaaatatactttactcagtcagcttgtgtaacagagctctccagtggcatgtgggtctttttcagcagtgacaatagtttattttttaaatatactccacaaatgttgttctggtgtggatcttaatgtggagaaaatcagacaccttttcagtaagcatttcttttgtttctgtgatcatgttcatgttagtttattgtatttgtattagtttatctgtgggactatcccttaatatttcccaaaacaagaagacatttgcgaatgttttcaagatgcattgtacaagatactgttttgaactggatcaatgaaggagatgtttggtggccttggaaagccctggagagtaatagtgtggttctaagaagagttggcctgaatcagttcattcttgggttgtttgctaagattgtctgctgaaggtgggtacgtggaaaacaagatggtaagccaaggaggatgaagggaggcatgctgctggaccacttccagctcccaaatgactggatcttggccatcttgcttttcctgctaacttagaactgaactgcttattctagaaaatgagaggcactggggccatataggaaagggatagcattggacccaagtcctagactttcagtagtttgtttgcaggaccagggtcccaccccttttccaattgaaatgtaggcaaggtggtggcaagcccatggcctaggctgtgggaactcatagaacaactatagtgatgatcgctgccttggattgcagcctactctgaatgtgtgcacctgtgctaactactttcaggtgtgttgtcttgtttcatagactcattacatttttatgatgaagtgaaacccgtgaattggctcctccagacttctcattttaatgacaaaaaagtgggtctccagagaggagctgggattttccaagatctcatagtttgttcctcactttttgtccgtaggagaatcatagaagaaccagataatcttgtctcttatagaaggaatacccttacccttccacattcccgtggtggtggtgtgtttgcttttttatcagtcttaacccatgggaggctgcacaacttacataagaggctacctgttctgtttgccaaacggcagcccagacccatcactgagcatgtccttggcaagaggcacaacctcaggctgacactgtttccatgtccgtgagaaatgatgtgtataaacgatggccagtaagatgctcatctgttgggaagacaacagagggcagggctgagagcatggcttccctgctgattgcctgtgttcagatcccagctcagccgtgtgtaagctcttggttcttggggtaactacttgtttacctctctgaaaaatgggagtagaaataatgaatacttttaataggattattttgaggataaatgtatttatttatgtagagaacttggcacggcacctggcacagagtgagcacttaatgaattttgactgtaaatagttattactgttccactagattcaaatttcttatctttgcctttagctggatgagtgaggagatttgtaccaacgtcatgtattctcctcttccctgcaaattcctccacctgagtcctattgaggtgctccccattataaggagtcctgtgaatcaaagtggtatgtttactgtaaagaatgtggaggatgctgttcactgcattgtattgttatcttcatgaggaagccaggagacatttattttggctctctgttttagaaaggtgttctcctcatgacgacctgtttgcctctgatcttaaggacactttgaagcataccgagcaggggtctgcaaacttctttgataacaggcaagatagtaaatattttcagctttgcagggcagagtctctgtcacagctactcaactcttctgtggtagcagccacagacagtgtgtaagtgattggacgtggctgtgttccagtacaacttcatttacaaaaacagggctcaggccaacccctgatagagatattcatggtttttgtgtttctctctcaaatgctaactaccagaaaagcttagagtcaaatctgaatcatgcttctagcaaatatgtacctacacatttagcatactaatatcactcttgcttaccagtttttaccctgttttctcacatttatattccatttgtcataattatagctcctgtcttgactgtatcttctttcactgtgttttttgttgttgtcgttgttgttgtttttgggaatgggataggactgtaagtaaataaatcaattatatcttgctagcttagaaaccaggacttgagtaaccacttctgactcaaagttcaatctatgtggttaaatagggaagcagaccataagatgtatgcccagtggtgcacgttgctgactcgcaagctatgtgcaggctttagcatttagtgtggtgatgtgtgccctctaacctgagatgttgagagaggggcagagaagaagacttcttgtagccacaaagtttcattccttcctctctcattgttgtagcatttcttttaagtgaaaacagcctttttggtttgctagcctatctctggcaggaagacaaattatttttttacagtatcagacacgcggtttcctgtctatgtttaacttgctagcagaacatctcagccagctggttccctctggacccattgtgtccttaatgtcgttgctttacaccatccagcaaacccactctgtgtactgatcgcatgcattgagcattttgttgacttccgttgttttccgagtaagggaagtcttagaaatgctgccctctttctcccaaatctcattttatgtttgttcagctccaacaccagggagctggcttcttggggaaatgattagttcttgcatgtaagaaatgaaaagagtaaatggtgttttggtagctctgggggattttaggtatgctgccttggaactgtgcactcacgcctcaaaatagctggctttccagctgtgcatttttgtttcaaaagaaacaaaccagatttactttctggtctaaatgcagaagaaaaaataagtgtggaaatatggttgagaaaagttgttagaagaggaagaaaattatggattaaagttgctagtctcattcctgagaagagaaatcagttatttgaggtgatgactcagagctgaagcagctttttgttgtgaaccagccttggttagaaagcacacttggaattcatcaatatggccctatgtctggccaaggaaataataaagattttgcatgatagaggacactgtgactcagttgaaggaagcttagaatgtatttgaactgaattaaggcaaaagcaactcgcttttcaagatttttttttttcctaagtagcaaagtaaacaaagctgcactgaggccagatgtgctttctggttgtgaatatttgtactctagaacctcattctggtatgaatcagcagagtggaatctagtatggacacaggctgtctcaaattccatccactggatatgagtggccaagaaagcagtcggacccatactgctggtgctgtagcaaggttcgggtggttcctctgcagcctcaggtctctcccactgcggcctccatgtgttccataaactccacacccatgagtaatggcaagaagggtccactgagaccttttgctgctttgcgagtgtctcagtgtcccaccaggggaaaaaaaaggctcagggaggtggctaaccactgtgaaattgacttttatttccacccacgtatactccagaggctgtattcaccaccatttggacatctggatgacttgcctttggaaagtccttttgtattctaaatcgctcctgcatgttacctgttgtggaaaatatcaattttgccattacaaattatgcttttttttaaaaacatgttaacttttagagaaataatttatatttgcttatctacttttaaaaatatacatatatatgccttttgttgcctaattagaggatatagttggttccaatgtcaagaacaatttctctgaaatgtagtcattaaaattattcccatgtctttcattttccaggccccatcctattcgaaatacctgtttcttccaccaggctgatgtagttatgcttaggcttggctgcacattggaaacacctgagtagctttaaaaactactcattaactgggtcttactcctgcagtttctgacttaattggtctggggcctggtatcaggaattattttttaattcttcaagatattttaatatgcagcccacattgggaaccactggactcaagacagtttgttctgccaaatctttttatatttttcgtcacgttccccctgtagcctggaaagggacggtaacaattaaagaatggcagctaccacaggaaggagccaaaattatgccttcgaaggttagaggaggagaaaaaccaacacctgttttaccccatccttggaggaatagcaagacactttaagaggggatattattttgttttctacaacaatttacaagcaattgctttggaacaaggtcaacggcctcattgggaataggcatcttagcttttaaaactgattaaattatacgttaaaggaaagcacattttaaaccttaatgtgtccaaaaggttggatggcaaggtttgggtgctactgccttggcagagacaaggcagggaccagggaggctgtgtgcatgattttaggaggtgagaaactcaggtgggaaggaattgcagaagcctgtggttcacctggaaagccagggagagagagaggatgtattctggtgacctaacaggtattgtgaataatgaatatgcttttccaaagcgatctggtctccctgttggagagcatcctgaaataacttaagaaatgtaccttgctttcaggtttcctgagaacatgagggcccctagacagagtacaaggtgtaattcagacagccagccagaaaaagaattaaagaatcagggcaggtgtggggatcctaacaaaacctaagcttttagtagtcagaaaactgcaataacacagaaaagaaaatgaaaaaaaatcttgttccaaagaacatatatcaggtgtgaaactctctttgtgggaggacagatgtgtcatcatttcctggacaaagcctggtaccttgtaggcaccctcctaatgttggttgccctccttttaaagtcagagcaagagaagtagcaggaatctatatcctaaggaggaacataaagggtgaaaagcacagtggaagggatgcctaaaagagcaaaggctgaatcagggttttaatggcctgaaatgaccaattttctaaaacttgacaggtagatgtaaaatcagacatataggttcaaacaatcgattgcaaaggagcacttgtcaaaacactggctgggaatctgctcatgtgatgaagaccccagggtttagaggtgagttaaggtcattttgaaatcaggatgatctggctgaaagaatcaaaacaaaacagaaagaacaaaccatcaggagccttaaactccacttggtggaagaggaggtgagagtcctgctgtaatctttgctacacaagttatattccaagtattatatctgtgtctatcaaaacacatgatgaagaatcttaaatagcaagcgtggtttcagagaacagatcactttacccttagaaaaaaggtcctggcatttattgggcgctatatgctgggcaggctgattttagggtctgataaatctgtcagactttagagtctcatcaatgtatctcttgaaaagtaaccgaggaaaacatggctgttcaacctgaaaatgaaatgatctaggggttgtgagtttcatatccagcaggagtttaatagttctcatcccatagaaaacggattcattttgttactttttgctttagagaacagcagaaggaccaataatagaagcacacagaggctacatttgacttaatgtaaagaataattttaaacatatcccaatatttagactttatcccaatatatctgcagttagaaatattgtgatttgattatggaatgataacaaaggaatgatgtccttctaccataacattttcaggcagaggtttcacctctacctctcatgggtattctagaaagagattatcatactggattagaatacatgcaaggcttttccatctgggagagagataagaaggaaataatacaaaggagactgtgccatgggataggagaggtggcgaatagctttgttctgaaatatgtgcagttggaataaaacaaccacattgattggagagaagacttctttcatcatttgaggaaaaaatactctcaaaatatatccagaatgtcaaacagtgctatcaatagctagaagttaaattaaatccttcattgctagtgagcttactgtccttttgttgtttaattgaaatgactttttattgtttgcctaaattggtgtgctttttactaggatgatggatggggaagcatatctcattctacactcctccaccagttaattgactagaaaattatcatgggccattttctcattggctagtgctgaatacagctgtaccagagctttgcaaacaattccactaagaaattttttgtaggaggaaagcatctctatggcagagtaccaaagaacttaactttatttttgctaaactgtttagcaagaataaaatttacctctgaaacttgaatgtgtaaatgaatcactgagagaacttttaaatgtagattctgattcagttagttgaggacagcgctaagactctgcatttccagtaagttcccaggggatgctgatgactgctggtctgcgggcacacttagaataacgaggtgacaagttattctttatgtaacatgccaacaaaatttttaaaggtacagaaaatgatggcaagatctttgaactctgcaatatgaagcatatatgtgagtgcttagctttcactctctttctgtgtgtgtgtgtgtgtatacagatactaagacacagatacattcacatatatacatctaaatatatatacagtacagtccatattcagatttcttcaaggttaatgggtctattgtttaaattcggaatccagtcaaggacaacacattaaaattgattgttttgcctctacagtgtgtttttttggttttcatgacattgactttgatttgaataggtcagaccatttcatgtactttataaaggcactttgtagatttgtctgatgatttgattaattcagattaaacattttttaaagattctggtgtttttattgtaggaagtttttttaaaacagtaattctgcaaaaaagcaaggtttgccatttgtattcagtcatattagtagcaagacgactacagatgcatacttggatgataaaacaagtttaaaagctcaagaaaatgataactataaaagccaggaatagtgattactttttagaggaagggagggatctccgattgagttggggaacatgaacagacttctggggtggccagcaaaattatattttctgacctgaccagtggttacaagagtgttgatcttatagtaattcactaagccagacacttgttttatgcacttttctgtatctgtgttttattttggaatgaattctttttcacaagagagaaatcagagtaatttctctagttttgagggccatactgtgctcttgggccaagtatattattttaaatacccttaggagaaaggaaagaggaagagagggctaacttttttgggggggggagttgggggggcagggggagatgttctcgttctgttgcccaggctaaaatgcagtggcaccattatagctcactgcagtcttgaacttctgggctcgtgatcctcctgcctcagccttttaagtagctcagattacatgcccacaccaccacatccagctaatttttttttttttttatacagacagggtctcaatatattgcccaggctggtgtcaaactcctgggctcaagtgatcctcccacctcagcctcacgaagtgctgggattacaggtgtgaggcaccatatcttccccccatttttttttaatcatctgagtggcttcaaagcttttgttctttccataccaccaagctatctccttaacaatgaactgtgagatccatttaataattctgaaaatttccagtcacttctgtcactcatagaggccagacttagttgcaaataaggagccatttgcaaatgtcagagtcttgttacataaatatttttttaaagacaaatgtcaaattctttttttttctgtcttccaaagataaatgttagtatgccataaaaaaaaatacaaactggcagaaaacctcaaggggaaatcctgtggtatactttcctttggagtgattgaaaagtaaacaatttgtcttataacttgagtatgcatgtgcgcacacacatgcacacgcgcgtgcgcgcacacacacgttgctctcagcctcttttatgtcctttgttatgccgacaccagttcctaaaaggaacttaaaactgaacctccctaatccactattttaaataaaagtcacttggttaaaaaaataaaagcattaaattaaggccaacttggtaaataaaatcctatgtggatcagttaatgtgtcttgataaaaagcaaatcaacatagctgaatttgggagataggctcctactttaatatttgaagtagtttggcaattcctccactcggtaaaggagtttagggtgaacatttagtgggatactaatttatccgagcaatagaaagggacgtggatgacagtttttcgcacaccttggtgtattagtgcactaatgagcctcagatgccaagagagattcttgtgaagttggcagtgaagctctagccgcaaggatgttcacatgccagcatgttcacctaaagcgagagtatatatgcaactggctgagatccaaagaaggaaactgtgctaaagagagatagctgaggggaaggaagaacttcctgtctcaagtcatgttaattataacattaaaaggacagcattcatttattgagtacttactaggaacaacttttacttaacaagaatacttatttactaagtagacaaaaatgttgtagaagcaaccaaggttcagtatcctcctctgtaaaacgggggtaagagaatctaactcatacatagggttattggagaaataaagtagatcatgtttacaaaataaattgtccggtgcctaacccaacaaagcacatcgtatatgagttatctttcttattgttacaagatttcaaaggagggcttctcctcaaattctacactgcggagctcccttcccactccacagaagctccgacagcatccacagttgtccatgtgcagcacaacaaatcaagccaggcagatctcccattggcactagttaccaacttcctagagaaacccatcaatctcaaaattcctgctctagcaagtcctggaaaagagactagagcccaaatgccttcactctgccaagggagcttccctttttgtgtgtctgtgccatggacttcttgaagtagggaagcctgtggaccccttctcactgtgatgttttttaaatgcataaaatagaacatggagtatttcaaagaaaaccaattacattgaaatacaatgaccaaatattttaaaaatgaatttgtgttatagtaatatatgtttctataataatgctttaaataacaatagcagcagatctaaacaattgaaatgtctaaatggtgagcgtaagtcacatgctgagacgtctgcaacaacaaactcataggtacagctgatactaggaaatattaatttttaattaaaggttagagaaaataaaaaaagatgcaatttttgcccattcaaattcacagacccactgaactctatttatggaacccaggctaaaaatgtttactattatagcctcatttttttatgggccttggataaattccacccttatttttaatgcccttcagagctatatctggttcaatgttattactattcatggaaggtcccaatagtgcaacaattatgttttgagctctgctaagatctaggccatgagaataggctctgagaaaagaaaaagatttgggggttctccttcacataaaactttttatttcctggcaggaaaaagatgcatatttacagagacactactaaactgtggttcttagttcagaacaaaggaatataatccccatacccaaaatatactcctttagacacattatacaagaattgccaatgtcagtcggtggatggctgtaaaatcacttagtccaggctacactaaagaaaaacactttatcaaattgggagcttatataaagtcattcttcccctcccccgcaacccctacccccccatccccgcccgcacaaacacagggtcttgctctgttacccaggctggaatgcagtggcaggatcatagtgtgctgccgccttgaactcctgcctcaagtaaagtaatcctcctgcctcagccaccgtaatagctgggactacaggaagcaccacagtgtctggctaattttttttttttttaagtttgtgtagagacagtctcactatgttgcccaggctagtctcaaactcctaggctcaagtgattctcccgccaaagtgctaggatttcaggtgtgagccaccacacccagcctaaggtcattgccattcttagttggctctcaccaatatgaagtttagagatcaggtatggggttgagatcagaagtctctccaatcaggcaatgctcattgtaaataccagctttgctgttgcctaaatttatcatctgggaaaattacttaaactgtctgatctttagcttccctatctgtaaaatggggtttataataatagcagtttctacctcatagggtttttctatcaattaaatttaaatattctataaaatccttagcacacagccaggaacttagtaagtgttcagtttatgagtttctctgtaactggcggctgatgaaaagaagcatttcctgttggtcttcgactaaaggagatgctggcttgtacctacaccaacagctgttgggttttctagtagcaacccaagggttaatactgccagagggtgtgggtggctcctgtttagataaagccacatcccaaagcttccttccagccctggttgctattgttagagtttttcaccacctctttgaagtttcaagattgacagatgttattcaagaattcctccccctcaaattttttaagtgtaagtcttctaaagaaataacaggaaattttaggagaaagtaaaactttggtttctgacattgaactggggatttctagaatcttcttcagtcagtgccacacataaacttaaggggatttctgtttttgtgtttcctttaggctaaaaaggaattgaaattagcaaatacgactgtttttatagatatttaggaattgtaaaataaaattatccatgatgaatcaacatttcatctggacgttttagtgaattaaggacaaagctaagtaattatgcagttaatatttaaattttttcaaattgtatttctcatatgtgaaaaaaaattgactacatattcacatttggccaaagtgaagtctctccagattctgccaatgaggttattaaaataacacctctagaacaggggtcagcaaagtttttctgtgaagggccagatagtaaatattttaggctttctgggccagataagatctctgttgcatgaacctcttagttttattgttttttaaacaactctttaaaaatggggatggaaatcattcttaggtcataggactatacaaaagcaggccatggacttctgagccatagtttgtcaaaccttgctgtaaaatataaaaaatttgagaagtatcattccacgtaagtaatcattcagcttctaaaacaaacgtttgttgaataccataaattgccccattctgccccaggtgctgtgtatatcatgatgatcaaaacagacctggccactaccctgctttgtcaggagagaagcaatcagataatcaagtggatttctgattataagacattccatgtagttacagacacagagaccggagacaagtgggtacttcaagcaaacacattcattggataccacatataatagaggtggagtttcaggcagggagcattgtggaagtggtaagcctaagtggaaatgccgactgctggatcggctgttgtgtttgaatttgtgttgtgttcatctgcccccttaattttgtttgctgtacaacagggacagtccatacatctccacaagagcatcttttttttcttttgcattcaatcattctgtaattgctttgtcccaccccatttctgccctactcttgcctgttctttgtcccaatccaagcctcccagtgtaagaatttatgtttttaaggatcaatcaccaaattttctcactttccctatacttttaaaatgcattcatatatctttccaaaaaatggtgattttttttttccctcttggttgctggaattctgatatcttggggttacttctctggttactagacccaagattttcatctagaatatatagtcagtggaagttggcatttccactcagacttaccttaagaacaagtaatcatattacacataaaccttaaaaatggatatgtaccagcttcatttctcactgtttcgttagatgaaagtttcagatgctgggccaagcgcagtggctcacgcctgtaatcccagcacttttggaggccaaggcgggcagatcacaaggtcaggagttcaagaccagcctggccaacatggtgaaaccccgtctccactaaaaatacaaaaaaaaaaaaaaaaaaaaaaaaaaaaaaagctgggcatagaggctaaggcaggagaatggcttgaacccaggaggcaaggttgcagtgagcagagatcgtgccattgcactgctgcctgggtaacagagcaagactccatctcgagaaaaaaaaaagaaagtatcagatgctgaagtagctatgtagactggggtatataacctggggttcatcatcatgagccaggaaaatttaggatatgaacacacatgaggagtttaggagtggaggtttaataggcagaagagaagagaaagagaaacaattctctctgtagagaaaggagtctccaagcggaaaggacgggccagtggtgaatgtgctggattttatagtcccgtttgaagaggcggtgtctgatttacatagggctcacagattggttcaatcaggtatgacgtttacatagtgcatggggaagactggtcaccccaccctaatcttattatgcaaatgggctttccagttgatcagcaccatctggtctgttctttgttgtacacatggctgacaaagagaagggaagatggagctgccatcttgaacatgtccttagttcctgctggcattcacccgtgcaagctcccagcttgcctgtctatgtctgaagctcaactttacaggctgctctttgttagaaaatgatttggggctgcttttcattaaaaagaaacaccttaccgaggacttccatacccttactatctgcccaagtaatttcttcttaactcctttatcagtatcatttaggtaatgggttccccttgagagaatttggttatatcctcattctacctggactatattctcatcacttttttttttctctttaaacacctactgtaggtgaaaactgacaaatgaataatcaaaagatccttttctgacacggagtttggttccataccacctacccatttttttcctttctattccgcaggtgcagagtggtcagtatgggataattgctcttccttaagtagatcatatattctttctccttaacatagcactctttccactcatcactgacttttcccattcttcagagaccaacttaaaggcagttttttgctactgtgccttccatgtttctctaagcttttccacattccactaatatatagattacattgtacatttagcccctatcccagatgccatatattgcttacttgtatatatgccctaagtcctctactgggtactctctgagggcagtgccatgcccatcatagacactcagtagtgatatatttaatgaatgattctaggatctgagcatgaggcctgctcattaatgggtactttggagggcagatggatgacacataaagcaatagaattctgcatgtttgcccaatgaaagcagcccagcacaagctcccagtgaactagagctgccttttgctctctcctgtccactgtctgtttctattcatgtccttcttccaaaaaggaaaactatttcaccagagccaacaaggccagcacatgaaacaaagtttgaggcacaagatattatagttagatatctggtgctaaggactctccttgtcagcccacaggggcctgcttcagaattccaagtcaaaaaactgcagcatttccatttttaacttgttttacctttgcggccatgtttccattgttgctattaaatatttcagttccatgaaactacaattcgtatgcacactgaaaagaggaatgttgggtggatgtaagataactgtccaaagagatcctttccatggactcctctccctgtcacccatgggcccagggtagcctgaatgctgatcagagcagaacaagttggagtttgaaaaagagcaaagattttggtgcaaactgtggcacgctctgtgtttttaccagatgtcatacatgcagattttttgaaggcagaagctgtgtcattttttttcatgttcccaatgtcctgagcttagataacactcagtaaatggtttgtctttttatttggcaatattgaggacctgctgtgtgctaagtgcagtttacagtagtgaagaagacatggtaccttccagcatggagttccctgtccgtgggggatggcaagagtagggaaagacagatgtgaaatcaagaggtagagtcatagttcatttagtttaagttgtactgaattgttacctaggaaaagtataaggtgctatgaaaatgtataaaataagacagttttccaagtttttctaggcctctcttaagcagtgacatttaagctgaagtttgaaggaagagcaggggatgacgaacagatggccagaggcagggaaggctgaacgagcatgcacttgcatccctgaaataaaaattaacaatatcgtatctacaaaaactatgcagatgctaaaatctatagatgctcaggcatgaacccacttcctgacagtacttacctaccacatccaactccttctctccttgttttgtttccccatcagaatataacaccagcaatcctgacttgttgctagtcatatttcaagtgacaggcatcagcctcctgccaccactgggagttgccatatctgtcatcatcatcttctactgctaccgcgttaaccggcagcagaagctgagttcaacctgggaaaccggcaagacgcggaagctcatggagttcagcgagcactgtgccatcatcctggaagatgaccgctctgacatcagctccacgtgtgccaacaacatcaaccacaacacagagctgctgcccattgagctggacaccctggtggggaaaggtcgctttgctgaggtctataaggccaagctgaagcagaacacttcagagcagtttgagacagtggcagtcaagatctttccctatgaggagtatgcctcttggaagacagagaaggacatcttctcagacatcaatctgaagcatgagaacatactccagttcctgacggctgaggagcggaagacggagttggggaaacaatactggctgatcaccgccttccacgccaagggcaacctacaggagtacctgacgcggcatgtcatcagctgggaggacctgcgcaagctgggcagctccctcgcccgggggattgctcacctccacagtgatcacactccatgtgggaggcccaagatgcccatcgtgcacagggacctcaagagctccaatatcctcgtgaagaacgacctaacctgctgcctgtgtgactttgggctttccctgcgtctggaccctactctgtctgtggatgacctggctaacagtgggcaggtaagttagagctagtgctagatcccctttaccttgagcctggcctcaccctacctcttgatccatatctcctggctcttatctcaaacagccctgtactctggacactggtctagggaatctagccaaagtatggagtctgccttgagcatactctgctctgtcctgcctgagcatttttgctaatggacagcatttctcctcctatcttcaaatccttcccagttcagcacattttttcctcctggatcaatcctcatttctcttccagcaaatgttttttctttgtttcaagcactgttagtactttacctctattttttccctctcttatggttgtactcagtcctttctgctctatactagctgtagttgtgttggtttctttgtattaaaagcatcgtggaaggcaatctccctgaagtccaaatctacatccacatggtcacccaagatatgtagcacaatgccttgaacattgaaagtaaaataagtacttgtcgactgagtgagcacttccactcttgaagcactctcacagattaaaatggaaatgtttttggctaagaaactattggaaggtgattggaaatcaccacaacatcccttataaatgatgagcccagtgttttcacacagtggagtccatggagagcagcactgtcttctttagccaggtggcaggacacactttgaagcactcggttactgctcagtcagccctgtgtccatggcagcgcacgcagtgttgaggtaaacatcgaaatatggacagactaatgtgccagagtaatgagccatgcaatgacctcttgagaagaaaaaaactctctaatacatgccaataagaaacattccttggaatgataatatcaactcacttggcttccctagatccttgggaaggtaggactttattgttatttagtcagtttatacatactacaacactaaatatttaagtgagccattctctggaatatttttttcctttttcatatggatccgacgtttgcatattatcagtcatagagattagcacaggcctaaaagtcaaaataaaactacatggcccacaagttaaaattataaagtgatccagatttggtcttttactgtgaaaatgcttttatacaatttaatttagtagagatgttatgcaattgtactatatcctttgcacactggaatgtgccatgggataaacaaagattaagactcagtcctaaagtgatcaaaactgatagcaattattatttttaccataagtcttggagtttcaggaataaaaaaaaattcaattttggaaagcaaaaataaacatttaaaatatcacaaatattgtctctcaggttatctgtaaggatgttattgaaaaatgtgatgacataagtcatggggttagataaggcagctctggggtttggcacttccttattttggcatgctttgtttatggtctttagagggttttcagggagagaacatctattttaaaaaataaccatctatctgtacctttctgtgcatttctcattctttaaaacagcactttgattttttaaaaaaatcctctgcacgtgtcaggggccaccatcagctatattgtgaaaataaaaaggcagctggaattaaatgatgggcctcactgtctgtttttgctataggtgggaactgcaagatacatggctccagaagtcctagaatccaggatgaatttggagaatgttgagtccttcaagcagaccgatgtctactccatggctctggtgctctgggaaatgacatctcgctgtaatgcagtgggaggtaggtgtggaccagcatcattgtgtagtggtaaacttgtcttcaaaataagatcatgtgttgcttcgagcattattccaggggttacaaagcagttattagagctagttgagatctgatattatacaaccatcccagaactatttggggttatgctaaacagcctaggtttttaaactgaaagccacatttggagcataaagctttgtatctccttttataaacctttgtataattactcttctcttgacacatctcttcacagttatttaaatatctggcaagagacgaatactaataaatgtataagaattatctctaatgatcatgtgggtaatattcagataagcatctgatttcttttactttgtgttttaagatttttcagaattatgtctgggaaaaagatttgattcaaaatttacttttatggacatgacattgttttattgggcaaaaaaaaaatcattgtttgagatatttgtttaggttttgaaaattctagtgaagaggttattgaggaaggccgtcttcttactgcttaagcctgcaagactgattaggagacctacttttctcctgaaaagctggcttgctctttttatccccaagttcagccacctactgttttttttttcttttaggatcatttttccctgaacacactgtcatagcctcccaggtgccctctgctatgtcttctctgcagttgtatgctgagtccttttcactgttagaggctgttactactattgaccatgagactgtagatagaatgggcaacaaacatctggggtgccagggtgaggctattgttctaggaagtattatcccttgttgtccagaaggcaagaacagttgaggtctacattactataccctttcctgactctcttctcagtaccttggaggacagatgcatgacacataaagcaatagaattctggcatgcttgtccaatgaaagcagcccaacgcaagctctcattgaactagaactgcctttcgctgtctcctgtccactatgtgtttctattcatgtccttcttatttcttaggtgagacagggtcttaggtctcacctgagaaatctgtgcacccaagttcatcctggttggctgccaaatgaagccaaactaactccaccctttttttttttttgagacagtctcgctctgtcacccaggctggagtgcaatggcgcaatctcggctgactgcaacctctgcctcccgggttcaagcaattctcctagctcagcctcttgagtagctgagattacagacatgcaccaccacgctcagctaatatttgtatttttagtagagacagggttacaccgtgttgatcaggctgatatcgaactcttgacctcatgatctgcccacctcggcctcccaaagtgctgggattacaggcgtgagccactgcacccagcctccattccatgtttaactttttgttttgtgataattttagacttagaaaatagttgtaaaaatagtggagtttctgtatactcttaactcaactttgcctgttgttaatatctaacctaaaccatagtatggctatcaaaaacagcaaattaacctggattcagtgttcttaattaatccatatacgtatttgtacttccaagtccccagtaatgttcttttctgaaacaggatccagtctaggatcccgcattgatctaatgtgcatgcctccttagtctccttgaccttgtgagagttcctcagtcgatttttgtcttttatgaccttgacacttgtaaaaagtttaagacagttatttagacggtctctcactttgggtttcactaatgttttctcatgattagattgagattacatattttgggcaaaattaccacagaaatgatagtgtgcctatcttcagtgcgtcatatcagggggaataagatgtccatgtgtctggttattaatgttaaatttggtcctttggttaaagtgggacctgctgctatttgtccatttgtaagtaatacatgcctttgacctgtttctaaagatactaaatacctgtttagcaaaggtactagaactttcttattcatcatttacccactaatttgatgatctatgactaattcctgcctataacaattattactataatgtttacttaaggaagattttctgtttttcttgttccttctatatttattaatatgcattctcctttaaaaaagatctgtctcttctgacaccatcccctgttctttgtttactaattatgtatttatatcagcaggggatttggggtatttgtttcattatatgagtatccagtattgtcattatttattttgttgctcaggttgccacagcttgggtcactggtccaaactacccaacattttgcccaaggcagattcagttggcaccactgctggctctgattcttcatcctgttcagaatatgcatagccaattctccagcgtgggtccgggtcaccccctcccatcctgcaccctgctgaacctcacatgttttcctgagacccccgcatggggatggcacttcctatctagctgacatagttattattatctagtttcttgactgagatttcttcccccaaaacacttccaaaagttaactttgtttttccttgcacagtgaaatttgtttaaccaagtttcagccactgagaataattttatgcttgaaagctttgacagttccaaaatgaatctttagccgggtatgagttgtatcagagacaatgctgttgtcactgtcagaataaatttacctagatttcagtatcattccctatcctttcaactctgttattctataaacatgagctggagattgtgtctctgtctttccctctgtcagtgcagccagcttattaaggccctaggtgagctcccagctttcattgttatcactgactaaaacccttgcctgttgatatttgctgagtgtggaagaatttaagctaatgaggaaggagttcaccaaattttacaaggtctaaaaacagttagaatataaacaagttttcccaaggaaggaacaggatatggtttattcagctagtctcaaaaaaccttttataaccttaggataagaagagacagccctggggaaccggaaagaggccatcccagttctcatttcgtttgatcttaagcccacagtcctatttctcccatctttgctcgggctgcagacaccaaggttatttatccatcctcacgttcgtcctgacacaaagccgttcacttgattaagcgtgtgaactcacgtagtaagctccttctcccaccttgacttcttcttttaaaagcattagtggtttttgtttgtttctttttggcatgtctcaaaaaccttaaagacagattttcagcctagtcttagtttcagaggcttttcttttacattcaaaaggtcctttggaaagtacacgaagcctgaagacagatggattccctccaactgcattcatcttgatgttgtccctgctgtagcttttgtagaaacacagatggaaggacaggttttgacctcaagaagcttgtagtctacaggaaacagttgtttgtttcctctcccttctttttaaaaaacttacacatgcagatatgtttcttatcttacaaattaaataatgaatccccctgtttgatgttagactttaattttaaggtataaggaagagggaaggatgtaaaaggtctttccttaagcttgaacttctgcagtttgcagtatagcagatgtaattaccatttttttaaaatcagcagtcttatttcaaaaaaggaaatgtggaatgtgcttacctttgtatgatgaatcatagatggacagtaaagggaaccagatctccagagtcatcttctctgtaggctctgagtctgtgtgcttgtgggatcatggatcagggccacttctgtgacatgaaaggcttatgatctgacccatcgagccagctaccaagcacctgcagagaagcctgctcaagaggtatggtcctgccgggcgcggtggctcacgcctgtaatcccaacactttgggaagccgaggcgggtggatcatgaggtcaggagatcgagaccatcctggctaacatggtgaaaccccgtctctactaaaaatacaaaaaaattagccgggcgtggcagcaggcgcctgtagtcccagctactcaggaggctgaggccagagaatggtgtgaacccgggaggcagagcttgcagtgagccaagatcatgccactgttctccagcctgggcgacagagcaagactgcgtctaaaaaaaaaaaaaaaaaaaaaagaggtatggtccacctcaactgtgtgcagaaggatgatgggatgcaagtctccagtgaaaacagctaatctacatgacaagtatagtggatctacccactgaaggagagtaagtgtggctgcttggatttctcgggatgactgccattggtaatatggatatagcaccccatcctgtactgagagagtccctagttgtattgatacttttttaagctatggaacattaacctctctgttcccagttgttaatgagctattgcagaggtgactatttgttttactttcttggatgttaacattacagtactcactacttgaagaaaaatgttctaagcagcagaaggtctaactgaatgaagtaggatacaaggattagggacagaagatttcacagaaaactgtgaagtcccacctagcctgcctttaagtgactcataaacatggatattaaggctccaagctcacctccacgccacattctcattctgtgttcatcacttcatcatgatggatgtcttttaggtcttacctccaggctttgtctcatgctatttactggcactggaacacttaactagtctgtttttaacaggcaagtgtggttcagttgtgataaatgcttaggaagggaaggcagtgagctcaaaggactgaatgcccaggttggctacagggagtgcagtgttatggtcagggaatgagacttaggtcagctcttaaaggaagaggaagactctggggcatccttctgagttacttctttactagccagtctcccctgaatgcaggggagcacagggaaaacagagaaagaacagcactacactggagaagcctcacttttatcaggtgagaaaacataaacagatgataatagagctcttcaaaagccaggtggtacagcttcatttcgcacaaaattccaccaggggcctcgggagatgtgttgcagttaggtgaagagagtggtcagagagaaaggcttcttattgaaagtacatttggtccagataaagaaagccataaaggaataattaccacttcttaagcacttgctccacacatcaactcatttaatctaccaaaactctttgaggcctgtactgttattaatcccattttacaataagagaactgaaggctcaggaagtgcgaaagttgtggagccaggaatcaaagccctgttgtctgactctgtagctcacaggccttagtattcctggtatactgctagcctggccaatggagaacgtatttaaaatagtagctatggccatgtacaggtacaggctcacgcctgtaatcccagcactttgggatgctgaggaaggcagatcatgaggtcaggagtttaagaccagcctggccaagatggtgaaatgccatctctactaaaaattaaaatattagccaggcatggtggcgggtgcctgtaatcgcagctactcaagaggctgaggcagagaattgcttgaacccgggaggcggaggttgcagtgagctgagatcgtgccactgcactctagcctgggcgacagagcgagactccatcccccccgccccccaaaaaaaatagtagctatgattcctatgatcagtatggatacgatagtcagagctactctgtgcatcctggcagtagatatgaagccttccagcagaagctgaggagacaatcacatgtttgaggaacattcagtgatggcctcacttctctgggtgaatccctgttaacagaatccaaggctgttaatttgtgtagcaggtcacagtattgataccttaaaatttgagataactgttttatctttatttccctaaagatatatttattcattcattcactcaaaaagtatttattgagtacctattgtgtcgcaggcattgtttaaaatgccagggatacagcagtttaaaaagcagtgtctttctttgagagacaggaagtctagtgaagagccagtattttagggacaggtaatgaacaaagagattatgtaatataatgttggagttgggtggggtgggtgggatgattttagaaagaaaaatagacttgggggatagataatgaaagaggctgtcatttcagacattttaatcctctgaaagaatacaaaagaaaaaaaaaagaaaacaaatctttcagaattgtttgaagtaagaacaagacaagaggaggtgattggtgtgttactgttctacgaaaaaggagaaaaagcttcatgaaatcgccattcagcaaggacagaactggagatggcttctcttttacaaagaaatctctgtcccaggctttcagtctgtttggtgttcatacaagtgtttgtgtgttgtgtggaaggcgggtgaaggcgggtgaaggcggtcctgttcagggccccctttggtgaacacagcaggcaaaatactctcgtcatccccagccaaactggcctgcaagcacactgacttccacatccctagcatttaggcctttgaatagaagctgacacgtagcagccagctgaacaagtatttaatgaggagcaacacaactccaagaagggctccttagtgtattgtcaagttgctgcagccttgtgagatgaaaaaaaaaaaaaaaaaaaaagtgcaaatgaaccaaaaagaaagggaaggggctgggggaagaaagagacagaaaaaaaggaggcgttggagagacggctgaggagagaccaggattgaaacgcttcattttcctggatttcaagggagcacagtctggaaagcagatatgaaaactcgggggtactgctttggggaaaaccatcaacaactttgctgccctgttacattgggactacagtcaaaacagcagctgtgcaccagatgctgactttccgaggaataccattgctgtcccagagacctgccctctgagggttgtggaactgggaagagacaggcaagcgtagttttctcttaagagccttttgagacaaattaaaagaagctgcgagggccgggcggttgcgggtggcttccatcagtgaaaagactgcagagagaggtggcgggagggagatggaagtaagagaaagtcgttctcaagcagtgaaataaagaggttttttagaaaagatgccgtttgaggcactcagggaaattctgaggtgttcagccccgtctgtctggcttcagaaacagtctgagggtgagacaaagacttggtttgatgaactaattctgctgtgtaggcatatgtcttgggtggagtgcctccaaccctggaacaagaatttgagtactagtagtttatttgggaagagattgcaggaaatgccagtaagagaatgaggaaatgagtcaggaaagggaaggaaaccagtaaaggatatcttatcaagtgggttaccaccatgggcaactggagtataactacgagcagaacacacacctcagtgtcataccacctgactcaaaggaagctgggtgttttatctttccaattcccatcagtttgctggagggctgctccaggccgagctgggagggttcactccagcccttctgcctgttcctcctggagttgggccagcctaaccggaagagccagtgcaatggggttgggaggtggcggtgcagctggccctgcagcatcacactgaataattgtagggggcatatgtgactattcttattttgtggatataggaagtgaggcacaaactcttggcatctcttttctaagtcctcatatctactttttaaaggagtcagggcaaaaacaacaaataatacttacaatgcatattgttagctcttccacttttgaagtgctaaactcagtcatactctctaagccttcgctttttctcttagaggcaattccaattttttttaaaaaggtggttcttgttataggttagccaggtgtaacattttctctggactcagcccacacactcctgaacttgctttttatgcagttcttcacaagagagaggcccaaggtcaagcatcatttgatcaaatgtgcaaagaggaactgcattaattctattgccaactatgccccaatctgatgcctgtagctaaaatgagattctcatccttacctcacctccaccaccagtcacatctacttccctaaacccagaaaggacaagtgtttgggtttaatgtgggtaaataataccagctaaggagagggctgctctttgtaattgtttttttgcatagctggcttagaaattacaaataacaaccacccagcagatcccataaggttccccttctcaaggttgtatgctgaggagggccccatcaaggcagggagggacacacttgtcacatttgggaagggcatgttcataccagggactgccccagctgtacttgctctggttaggggagaaatctctgcaatgcttggcagagatgagcaagcatgaaagcttcctaaaaaggcaaaggcaaatttcttcagagtaacagtaataaagtgcacaattctaaatgctcttcctggaatccagtgtactatttgggcctcagttttctcaactgtaaaatgaggatgttggatcccgtctctgaagaccttttcaatattctttgtctgactcatttgaaacccttaaaatatgtttaataacttgtgctcttttttcctgtgtcaaaatgcatctcacattccttaagaagcatttagggcaatgttgctccaagtgtggtctttggcaggtgctggtcctcaaactctctgttacagatttgcaatataaggacagaaaccaagatgtgttttgtgcctttaatagcagtttgatgttgccacaacactcaagtgggattcatttttcttgtaattcatttctactgtattttaccaaagcctttattcccaatgaattgagggcaaaacatctgggcttttataaaaaattgattgagaagtgctcatttgcaagtaataagggaaaaattttaatcacttttaatctcactattccacctaagccacttttgtgaaagaaacagtggttaggagttggggagagatttacatttctttatacatatttgtttagtcatttcatagttttaatcacatgcattttccaaaataaaaatattttaagcaccatcatgaaaaataaataagatacacagtttggacccaaagattttgccaaagtggattaaacatcccagtctccagctgcctgaaaccctggggaaaaagttgggagtgtcaaaggtctcaggccatcaacttgttgccaatcaccagctctgtccagttccccaggactgcctgggctctgttacatgaggtctcatcctaggaacgaccattggtacccacctggctggcagagggctttctgctttctaacctcctctcgcagggttcaggctatctctggccacgatcttcccttcttctgctgagtcaaagcaaatatctgaggcattctgagggacacttagaactgaggagcaattaagaaatgccctccaggagggactggcctccatgttacatggtcatcctacaagtcctaatggaggccctgagaatggcattgccttaatggccatagtaggaaaaatgagcaatgttgcctgatcgctgcaattgaatatcaaagatgttaactgagaggcacatgtatacacactgccaaacattaaaccatcttcctacacattgcagggcatgagaaaaaaaaaaatggaggttgggagtaggatgtccaaaatgagagagaagggtaaagaaagaagaattgcaaaaatccataattagaaagaaaaaagcaaacatgcatttagctgttttggaaaatctatgttacataaataggacatttttcagaagttaaagaaaggtcagcctaaatcatgcacacactgcagatccccatccgtactcctaatctgaaaaactaatattaaaggattagagtatgacagtttaggtcaaatgatgatcctccctccccagacttgtctattttaagcttaggaggaggcagaagagtcataaattctcccagtggggcacaaggagccagtccttttgccagcacctttcagactacccgtgacctcccttccttgtgaaattacccataagtcgaagatgggaagcaggccttgtatcccttgggaatattagggagtctcacaactttccaagattttaggaaaagtaggaagtaacctatttataagtctgtttgttttgggaagggattattgcctttgtcttcctttctaaaatagcattcattaatttttctttaagtaaaaatatgcccaatgccatcttctctcattccccatggaaacttgctttgatccacagagtacctataaaaaaaattacaataaattgtgtagtgtttgtaactaggaagattaggacttggaatgaattggctctgcgtttatagtctcaaggacaaagactttgtctttgttctcaaggactatcagccatgagattgacagctggggtttattctgatcccaacattttcctcctctgatgttggtcatgtcctcctctgtcacttctgaccatgagtatagggattgttgttgatagtcagaggagaaagaactctctgaaatgcttggtagaaaggaaaaagcatgaaagctttctagaaaggtaaaggagtttcatcagagtaacggtaatacaatgtgagattcagaatgttcttcctggtttagtaatttcaccttcacaagaaggggctacatcaaggcttccccagggtagctttgcagctacagtcagattgtgcagattcactgagacaaaggcctagggagagaggagaaagcacttccttggcggctgtgttgggccagctttactagaagtggagtctgacacacttttgtgcaatgatttattgaggataagctctcatgagaaggaagtaagagaagcaggaagaggcatggaaggagttaagtgaacttgtatttcaagagaggtctaacctcagcttgatctcactggaagctctggagagtgtgaattgcaccatagttacccaccaagagccaagagaattggactgttaaacttcaacattaatttgtcatcggctatacgctgcctctgagagtaaggcggtcatgtccacgaatctctaggataggcaactcccattggccaaggacaatcccccagaaaagggtgaaggtgtgagcccttatgagccaacacctgtggcagctgtaggctgctggccctagcttggtcaaggggaccttggcaggcaccaactgcagctgctacataagccaaaacaattgaagatggaaggtctgtggactgtaccttatctaaggaacaatttatatcatatacaaatcctatcctttactattatatggtagtacatatatctcaaggtatggtaccaagggggcatcatatttgattagattggattacaagataaatctgaagaggaacatggaggtagctcagttcagtatattcattttatagaagagaagaagtacatgagagtaaacacttactgggaaccagatctgattctcagttttctcttttgcttgaattcaaccgaactcatatttattaaattcttactacgtataaggcacgattttaggcactgagcagataagtgaaagacaccaaattcagccactgccttgtgccttaggcatttacagtctggttgaagataaggaatgaaagaaaaaaataagagtataaatgctatgcaaatcacaattcagatctcacccaagagcaatgtggattaaatgcttgggtcctttgaggcaaaaagcatgacacacaggaggatagtttgtggtttgtcttaatgtgatgggaggccttcatcccaaattcccctgtatttaaaactataaaaaagaaaatatcctggcagctctactatttggtgaagctgaaaaagataaatattcaagtagagttctggaaaaggggaaaaaagcaaatgaacaaagaacaaaaacaagccgtcccttttcaaaatgtcatcttgccatgaaagcttcttcaattcgttacctagaagtgcaaatgtattgaaagttttactcattaaataagattattttgaagctaaaggccaaagatcctacttactttggagaacagtgttgaatccagcccaatctctcctttcagcccaggcatgttttagtactgggatgttttctatctttttaagtgtcctgtgctctgtttacactatattaatctgctcatttaaattggtgttttgttttaatgtttggccagagtttatgcactgccactttggagagaatctaagattcattcattcattcattcattcactcactcaacaaagcatttgttgacagcctgttggcatgggagacccttgcaattggcaccaagaatacaagaatgagaaagggactcaacttgcacccaaatgctcacagtccagttaggtgagaaaaataagcaggtgaatatattaaataaaatatggtatatgcacgaatagagccctgcccaggatatctaaccaagattgaccctaaggatgttcaaggaagtttttataaagaatttgaccttagttgaagcctgaggccccggtgaagggttacctcctcctttatcattttctttattgaatataccatcagaggaaaattatcgttttaaaattttgttgatgttgttaatctgtcccctctgtcttcccactaaaacagcatttctcaaccttttttaaaatcagtgatatcgtaaggagcctttttaaacaactttttttgtttgcttgttttgttttttattttgtatagatagaggatctcgctatgttgcccaggttggtctcaaactcccggagtcaagatatcctccttcagcctcctaaagtgctgggattacacacatgagccacagcacctggcctgtagacaactttttttctaaacactactctccatgatgtttttctgtagcaaaataggcataatataaaatgtaccatcttaaccatttttaagtgtacagtttactggcattaagtaccttcgcagtgctctacaaccatcaccattattcatttttctgtactgaaatttgctcaactgaaattctttaccccttaaaggataacttttcgtaccctttcctcccaggttgccccctggacaaccaccattatactgtctctgaatatacctgtacaaggtacttcatacaagtggaatgatacaatatttgtccttttgtgtctggcttatttcacttagcataatgtcttcaagattcatccatgttgtagcatgtgccagagtttcattcctttttatgcctcaatacctacatgaaatttaataccacattttaaatctctttgtatactctgggcctttggaggctcacaaaccattgtaatacataagatttttccacttcccaagaaccagtttcacccttttgctgcaatatccccctgtagaaaatgcctgtgttaaaacctaagctccgtgaccctctctatcttgttgtccactgtgtcccccagcgtaacacctagcacattttaagtactcaacaatcatttattgaatacttctctagcccttccccaaccactccttccttcttatcttagccattattattaaaatttgctcttagagtaattacgtatgtatttgttacttagtgcttcatgctccccagccaggcatctcaccatgctcatttcctttggctgcacatgccattctcagtgaccctgtgtttgctggctttcttcacagaagtaaaagattatgagcctccatttggttccaaggtgcgggagcacccctgtgtcgaaagcatgaaggacaacgtgttgagagatcgagggcgaccagaaattcccagcttctggctcaaccaccaggtaaggagtgagtgtttacaaaggtcagtaagattcaaccaagttgcctcttaggtggcagagaattctggaatattgagcttaaatctgagggaaggtcccattgtgttctatggccctgttaaattttgtttataaagcaaatttcaatacagtggataacccaattattataggctccaaccagctgatatgtactctgagagttcacaaatagccattcggaggacatttgccacattttccaagcccccttggtcctgggttaaaacattttgtttgcagcctctgctacttactcctgggccttcacgtcaggagtttatatttgattccctctggattccaaatgttttcttctgggaatcttcagctccataaggaaatacttagcagatgcaaaacaagcagggtttgtcaggcagctgtagtgagaagtgactgtggcatgcagaaggctgtgtacaggtgtttgcaggctgtgctcacagacttgggagaggcctgagtgagcacgcgtgggaaagaggagaccgactcctcactctggaattaaggaaagcaaagaagaggagaatgccctggaaggaacgagaaatctgtctgttgggaacatcctaatggcctcttatttttccttgttaagaaatgctagctaaggctgtccatagcagggcagtcattctggactcataaagaggctgatccaaattgtttgtttgggggcactttgatgagggcaatggtcagagaaaaaagaaaacgataggttgtgagtgagtcagaaccagctatatgtctgacacacccaggaaggagcccttagtgaagaatgagagagaacagtgtggccctatctcactgagaagactgttctttctactgactaaaaccttttattgcctcttttggatgaattccctcaaccatgaaggccgaggctaagttgttggtttccctaagggcaaggcaaattcagataagaaacagaaacaacaaatcaggcacaatcgggaagacaaatggagcaggaagtctggtctgtgccagtcctggcccagagccacttcagcagacagaccttaataaagtccgaggaggttggcgagggggaaccaggctgtggtgggtcacaggcttctctggagttttgagcaaatcctctttgacactaaaactgtaagaatattttgcataaattctgaaatcagaatgtgctggagtgttatgtttctttcaaactctgttgcctcctctgctgtatagttctcgtaatgatgccattattcatgatgataaaattctgaaaagaatttgcataatacattttttctcataatgagatttgttgccctattgatttcaagttaatgcttaatatttaatttaatttactgcctgtaattacagtgccagaataaaataaatgttacttgtgtaccaacaatagcactctactcttaacagggccatctgtcaatactgtcaattaggtgaattatgcaattaatttaacatcatgaactcatcgggtggggagggagagataggctcctaggtgtgtttggaaagttgttggtattagaaaacaagtagaaaaagtgccagctctcccaggtagttttgagatttatccatcccactcccagccacctgtgtgagggatcccattagcaatgttgatcttacaattgggaggagcacactctatttccacctatcagaccatttacttaactcctgcctgctttatttccaaaaaggatttgaaatgataacaaaaatatttgcaatgcaaaataaaaattaagccagtgagagaaaactcttgccaccttcctgggcaggatctcctggatggtctccttggatgggagcttgattcggttagggtgaaccctaggaaatggcatagagttaagcatgcctgacccacataggcagctgtttcacagggttcaacccaatgttgttggagaggaatggagcatcccagaggtcatccttggcagctcgtagaagctgctactgaatcactctacaaaatgtgtggcctatagaaaatgaaaccatgctaatgcctgcatacaattctgacgggggtaatcagccctgttaaaatagaacagtgtatatgacccaactatatgacactctggaaaaggcaaaaactacagagacagtacaaaatcagtggctgccagaaatttaggggaatggagggagggatgaataagtggaatgcagggaatttgaggggcagagaaactattccgcatgatactataatggtagatacatgtcattatacatttgtcaaaacccctggaatatacaacaccaagagtgaaccctaatgtaaactatgaatttgattgataatgatacgtcagtgttagttcatcagttataacaaatgtacctcatagatgcatgcatgatgtcaaggtggagaaggctgtgcctttatggggaaggggttttgtgaaaactctctgtactttccactcaattttgctgtgaagcgagaacttctctaaatagaaaggtgttgaaatgatattaagggccactacatggggaattttcaggtgttgggagtgttagtgtaccccagaagcccagcagaggatcattgtgctgtcaggacctattgtgatcagatagcaccagagccaaaaagtatggtaggttttgagcacagctgccaccagcacaaaccccccaccaccctttccacatggaactggctggcctgcagcagcaggcactcagtcagcacatgttaaatgcacaggcacttttggaccctgcttgcactcactatagcaacaaggtcagcaggccaccttgccttccgcggagcccaccaactcatggtgccctttggatctctttcccgctacagggcatccagatggtgtgtgagacgttgactgagtgctgggaccacgacccagaggcccgtctcacagcccagtgtgtggcagaacgcttcagtgagctggagcatctggacaggctctcggggaggagctgctcggaggagaagattcctgaagacggctccctaaacactaccaaatagctcttctggggcaggctgggccatgtccaaagaggctgcccctctcaccaaagaacagaggcagcaggaagctgcccctgaactgatgcttcctggaaaaccaagggggtcactcccctccctgtaagctgtggggataagcagaaacaacagcagcagggagtgggtgacatagagcattctatgcctttgacattgtcataggataagctgtgttagcacttcctcaggaaatgagattgatttttacaatagccaataacatttgcactttattaatgcctgtatataaatatgaatagctatgttttatatatatatatatatatctatatatgtctatagctctatatatatagccataccttgaaaagagacaaggaaaaacatcaaatattcccaggaaattggttttattggagaactccagaaccaagcagagaaggaagggacccatgacagcattagcatttgacaatcacacatgcagtggttctctgactgtaaaacagtgaactttgcatgaggaaagaggctccatgtctcacagccagctatgaccacattgcacttgcttttgcaaaataatcattccctgcctagcacttctcttctggccatggaactaagtacagtggcactgtttgaggaccagtgttcccggggttcctgtgtgcccttatttctcctggacttttcatttaagctccaagccccaaatctggggggctagtttagaaactctccctcaacctagtttagaaactctaccccatctttaataccttgaatgttttgaaccccactttttaccttcatgggttgcagaaaaatcagaacagatgtccccatccatgcgattgccccaccatctactaatgaaaaattgttctttttttcatctttcccctgcacttatgttactattctctgctcccagccttcatccttttctaaaaaggagcaaattctcactctaggctttatcgtgtttactttttcattacacttgacttgattttctagttttctatacaaacaccaatgggttccatctttctgggctcctgattgctcaagcacagtttggcctgatgaagaggatttcaactacacaatactatcattgtcaggactatgacctcaggcactctaaacatatgttttgtttggtcagcacagcgtttcaaaaagtgaagccactttataaatatttggagattttgcaggaaaatctggatccccaggtaaggatagcagatggttttcagttatctccagtccacgttcacaaaatgtgaaggtgtggagacacttacaaagctgcctcacttctcactgtaaacattagctctttccactgcctacctggaccccagtctaggaattaaatctgcacctaaccaaggtcccttgtaagaaatgtccattcaagcagtcattctctgggtatataatatgattttgactaccttatctggtgttaagatttgaagttggccttttattggactaaaggggaactcctttaagggtctcagttagcccaagtttcttttgcttatatgttaatagttttaccctctgcattggagagaggagtgctttactccaagaagctttcctcatggttaccgttctctccatcatgccagccttctcaacctttgcagaaattactagagaggatttgaatgtgggacacaaaggtcccatttgcagttagaaaatttgtgtccacaaggacaagaacaaagtatgagctttaaaactccataggaaacttgttaatcaacaaagaagtgttaatgctgcaagtaatctcttttttaaaactttttgaagctacttattttcagccaaataggaatattagagagggactggtagtgagaatatcagctctgtttggatggtggaaggtctcattttattgagatttttaagatacatgcaaaggtttggaaatagaacctctaggcaccctcctcagtgtgggtgggctgagagttaaagacagtgtggctgcagtagcatagaggcgcctagaaattccacttgcaccgtagggcatgctgataccatcccaatagctgttgcccattgacctctagtggtgagtttctagaatactggtccattcatgagatattcaagattcaagagtattctcacttctgggttatcagcataaactggaatgtagtgtcagaggatactgtggcttgttttgtttatgtttttttttcttattcaagaaaaaagaccaaggaataacattctgtagttcctaaaaatactgacttttttcactactatacataaagggaaagttttattcttttatggaacacttcagctgtactcatgtattaaaataggaatgtgaatgctatatactctttttatatcaaaagtctcaagcacttatttttattctatgcattgtttgtcttttacataaataaaatgtttattagattgaataaagcaaaatactcaggtgagcatcctgcctcctgttcccattcctagtagctaaa

SEQ ID NO: 35 - DNA, 50155 bp, Homo sapiens
ctgaagaaaggactagtctgacaggaagaattacaaatctggagctcattttggcgtcgcagagggaaggtgggtggagcgtctcgcagtaaattaggaattcagaatgaaaacgtagagtttatttgggtttttagtgacacctcaggattattatacagcagtgtcagacacagctcaaagtaatgatgactgctccccctccgccccgcgggagctgggtgctaagaagggggaacccctcctttgaggggttggggtggggatcctccctttccaacctggatcgggaaggggtttgagaggagtgcggcttggatccccatcctggatctgtgctggagggaggcgggaggctatttgggggtgtgtttgggctcaggatctgggtctgacgctgggatctgaggactttctgggtttggaactgggtgggggagctgggtttggggtgaccgctgggagcaggaggaaataggagagtgagtcgcatgtgaagggcactgaggagggatcttcgggggaatgctgaagttgatgcgtggacttggagaggggaagttgaagtggatgcaggggcctggcgctgcagcggatctgggtggcatgtgctgggattgccaatgcggagctgtgaatggggtcagggtggggctgaggcagtaccagatcttccgcgcctagaggaggttagaagaaaagagcgtcgaacggccacagcctttttccgaaagagactcacacagacacacccatcgctctacccggccctccggggctagcggctgagcggtgctggggctggcagaccccgcccccacgcggcctctcggagccgggagccgatcgggccggggctggggtctggcggcccagcccccggggagcgtggggcgtggccagaaaccggcgctcgcggctgcggattggctgcctggcgggcccgcaggcggggctcccggctgggtcccgcttggcagctcgcggcggcggggaggcggggccggcgggagcccggcagccaatggacgcgcgtcctccgagcagttacaaagggccggagcgaggccgccgcggcggctagggaggtggggcgaggcgaggtttgctggggtgaggcagcggcgcggccgggccgggccgggccacaggcggtggcggcgggaccatggaggcggcggtcgctgctccgcgtccccggctgctcctcctcgtgctggcggcggcggcggcggcggcggcggcgctgctcccgggggcgacgggtgagcggcggcgcggcgggcgggcgactgcggggcgcgcgggccggacccggcctctggctcgctcctgctctttctcaaacatggcgcggggccgggggcgcaggtggcggcgccggggcccgggccgggctctcgtggcgccgcgcggctcggcggctgccgggcgaaccgcaagcggggagcggaggcggggcaggggcgtgtgtccgggcgcgggcggacgtgtccggctgcccgaggccgccccgctcgggactccccggggaggtggagtcgggcggagtcgtccgaggtccggggctgccctctggggtgtgagtgggcgagggccaggggcggagagtgcgaggccggcggggactggcagagccgtggctgcccgccgccgccccctgggcacggcgtgaccttgttctggggacccccgccccaagagggtccgtgccagaggctgccgaacccggggcggggtttgaggttggggtggaaggcggctcccgggcggggtgtgagctccgagcctctagggcttcgtccagtgggagtcgggggcgacgtgtggtgagacccctgggtccgcaggccgccctgactcccgcccggctcgacccgagccgaccctgctggaaggggctgctcctccagccaggggggctttgtgtgagaagaaggaagcgcggagatgcgcggaatgtttcttctttcgtgcgtctggggagtgttgaagtgagtccagtaaccagacggctacggattgttttcatagtggaaacttgaacgtttgctcattctgcgggttttggaaattttgggaacgactgtgaattgattaaacgctttttatttcctcgaaggaacatcactcacgttgttccttttcttgagtgacagttaatagtttgattcagacatctgtatagctggttttcaaggaagactgttggctggatttttcaaaatagtaaatcaggttggggtaggtggttggtatccacaaagggatgagtgaaaaacttcgttagcagctgaactgagacactagaagctaaaatacacagcctcagtgttagcaactaaaatgcagtgaaagtacatttctgtttctgaaactggacaaaagatgttgaaatttttttaaaaaatcaagactgacggtgacgattataatcagtcctaatagctaccgtctatgtattgtgcattactacgatgtaaatgcatacactattgtataattacattatttaatcaccacaagtaaactcccaggagtagtggcatttgccccactttacagatgtgcaaagtggggtacagacacgttaagtacccaataacttaagtgctaaagctaggattttcactcagatctcagtttcccaaacctgtatgtcatatatatatataaatatgtatacatcatactatctggcgtagcccatttttcttcttcagtcgtctgatgagcaattggtctttattatccactttggattctgtcctcatgatttgagtatcagataggcttcattccgactcttagcacattgttgagtcccttcacgtgggcctgcattagaggaaacaatggatttttgacattggcctagggaggaaggcaggataactgtgtggacatttgggagaatcagtatagttaggcatgaaacacaggtaacatttccacaccgctattaacttgaataacacagtgcactcttttccaccagaagtagcacaagaagcgttcatgtattcaagtaacagtagtggacttagttgaagacacagaacattgctcagtccatgtcctggaggagtttacagtctccatggtatgcacaaaatacaaagctgtccaggtgcttattactctaagcccagactgcctcagcttgtctgcctcccctgttggttatgatgatgcctcagtccacccttaaaaaacattctgaaaaaggtcaaatgctttttatttcctctgtaacttggcttcccttttaaagacttgcacctttttatgttctgagtatgttttaatgttctctgcccaacttctgtctccaacataggtttctctagggaaattgattccttatccctagtgcacagtttagtaccactatgtctatatgtatatcccatctgagaatgctatttgcttcctttctgccatttcataactttttttctttgaaaacgtgcccccaatccaactcttctatgaatgcctcttgaatgtctcctcctttcttggtatgcagccttcagcttaatcctgcctgttatcctccaaatctagttgctttcccatgtttttctcatctaggcttttctatggctactgccaaactaatcttcctcagccttccccgtgaaggtttataagatttcccatttgtattcagcacttagaacaacacttagcagcttatgattggggccatctctgagtatcctaccagggatctcatttctcattactgcagaccttcgagcaatttctctttctcactgactcctgactgttcagccttttcactacacatttagttttgcccctttttttgggagtgcgagaagttctcagccctgacttcctgtgctggtttagttcttgaattctttgtcttccagaactctgcaacacttaacagtttgtgttgtccatttctactgcctgtgctgctacttaactctacttgaatgcgttataggtacccagaggacaagattcatgccatttctttcttttgtggcctcagaacttagcactgtgttttatattctattccacataaatgcttgttgatttctatttgagcattcctttaatatttatactgttttatgtaagtccagtttatgcaatattaacttgtaattccgtataaataatcaggaaaagttgtatggcgtgttgaaagcaattggttatttgtcctaccttcaccagcagttatgcagaaaatggggcaatacctacttttgcctaattcatgagattgtgaagatcacatgagaaagtggtatttgagtttgaggttgctattctgtgttgttgctaaagagcaggactgatgttcaataagcagttcccactgggccatgtgtgttttggttaaacatcctttctgattggttggtacccttgtagtgccagttgttaaatatttttaatatcatttctatagggaggcattagtattcaaaaagggaaatgattagtgtaagctggaatgattgggggaggcttcttggacactttaggacttacactgactttgaagggtgggtagaattcagagggggatttgatgagtgtgaaagttcttttgaagttgtgtccccaactgtcctggggcctactccaagggaggaaacaaggcttttactgactgactggcaagttactcttcagagttaggttccttattctgtactgtggaatttggatgtattaacctctatcattttttccccaatcctaaaagctatagtacatagctggaaacaaaacataaaagtaatcaaagtggaatgagtgagggagaataacattatgggatgcccagtaggactaggcattcaaatggtggaagtcctaagtatattatcacttcaatttacagatgaaaaaacgactcaggtgaatttcttagggtggcacaggggcagaacagagacaggaactttgattttctgattccatatcttgtgccctatatggtgctttaaaatgtgaaggacttggaggtgggagtgggacagggttgggataggtggttggcatccacgaagggatgagtgacttccttaagtgaagtaggccttgaacttcacagaatttatgaaaagtgaattctaaaggtggaagggagggggaatgattaaagccttaaagttctcaaggaaaaggtcaatttttttttaattgctgataaaaggacctggtatatacttattgattgagaaaagtaggcctatagtagtttggaagatggtcttgagtaagtacagttaattgaattggggtgtagttagaaggctttggtttagaatattagatgatccgctttgttgttgaaattaagagaggaattgacataaaaataatcaagaggaagataaatcttgttcctgtgaggagggccgctcatgtagggaagacccctgtcaaaaggttctaggccttagttgagcagttacagggactcaacaccattcttgtagtgtcattttattgcaccaaatatgttcatgtgtaataaatggaattttgaaaatgccattatcctatggatggcccttctgatgtgagaacgtgtctcttcaaaccacagagccccttgcaaatgtcgacacacctcttgccttttgcagttcttccttggtcatggcttacgtaacacagagttctctgaacagatggactgtggtttgatatcatgtgattgggtcacatctttgcttcctgcttttggaattgagggcagatgctggcatatttctcagggattttttaatgctttgtcccatagaactagcttgaggaaaagttttggagtcttctcagaatttatggtcagttttgacccagcctaactccaatacttaggattacatttaatgccattcttagctgaattttctcaatgtcaaatccaggcagtctccataaacattaaaattgtttaccactctgaattagatccaattttatgtgttttgtttgctttccaggtaagtttcttatggctacccttcttcatcatgaagaaaattggttggtagacttgtaattattcatctcagacatcactttcttaaatactagtggactaagttcagttggttttatggtccaattttatagatcagatcaagtcttttataaagctgctccctcaaagaacaatttctaatctaacttaaaaaaaattgacttgcaaagtatacacacaggttgctttgaaatttcttgaagggttgcaagaatatgctacatattctatctgtcttgtctcgtttaattctctcttctctctttttttttctttgaccatggctaatacggcatcatttagttctcataaccaaccttgaatggtagttgtatagagtaccaaaacttcttacttatttgctgcttaatttccaaactcttaagcccatttgttcccagatacaggtgaccagtgctcagaagataactgtaggttttgataacatcggctctaccccaagattcttttcaactctaaacattatccaaaggtgttagtattttttcatcgtctaatcgtaaatatatatataaaagaaagacactgctttgaatggcacagatgtagactaacagtagttcagccactgagactcaaatgattttgtattaccataaaccccatctgcctgggcaggcagaattgacacaattttgctcagattggaacctagttcatatctatgaaagaagaccctctttgtttccattttatagaccaggaaactgaagttatgctgttaatgaaaggtggagccttcagttaagcactccagggtatgtactcttttcctatacaaatgctcctctacttatgatggggtcacgtacgtccatgctcctttcatatagagtaaatacattgttagagccacttcagcaggaaagtttcctttcccttttttgcaaaccatgagaatttgcttcagattgccttgattacagttttactatttctttgcaactgcaggccattcagatactaacagtctttctttaacattatatttttaggtaatttgaatcttcctgacgagtccagtgatagttgatcacttactatttgtattgatttatacatatattcatagcaaattcttttcttctaaaagttacataagcacaggactgaaaatttgtattagagaaaggaaaaaaaccatcaccagccattattaacatttggcatatcctgcacccatgcttttttttttttttttttttttttttttttgagtataaaaaaccattcttgggctgggcacagtagctcacacctgtaatcccagcactttgggaggccgaagtgggcgaatcacgaggtcaggagttcgagaccagcctggccaacatgatgaaaccctgtctctactaaaaataacaaaaaattagctggacgtagtggcaggcacctgtaatcccagctgcttgggaggctgaggcaggagaatcacttgaactcaggaggtggagtttgcagtgagccgagattgcgccactgcactccagcccgggcgacagagtgaaactccatctcaacaaaaacaaacaaacaaaaaaacagcaacaaaccattctttaatcattctatttcagcagtttatgaaagctaataaaagtgtttaaattgacaaacagcttcagtttacagaggaaagagcttcagtttacagaggaaatagctcatctattcttagcaaatatttagtagtgatcaacatgatgagaaatataggaaaagtaagaggcagtcttgcttttgaaaaaattgatgctgaggaaatatgactacagactcagtactagcaaccacagggactgctttacagaggaggtaggacttgatctctctgccttgcaggaggatagggctttgagtggatgtgtggtggaaaggaggcacttcttggctggagaggatggcatgtgtggagaaagagcattctaagtttcaggatttctaagaggagaaatggaagttcatggtgtaaagggtgggctcagagaattatgggccttgaaaatcaggagagtggttttaatgtggaaaaagaatgtctaattgtgccgcagagggaatggatcagggtggctacccagttggtttgatggcattgagaacggggtgaaatggtgactgtatgacatttgaaacaaagaaatcagaggaattagtagtagggcctgtgtgtggctgttcccttgcttgtgtgctcttccctcacatacctgcatggcttcctccctcacctcctgcaagtctttgctcagatgacacctttttctcagtgaggcttatcctgccaccttttaaaatattgtcatcatcctacagtgctttccttctctgtaacaataccttctaacatactgtatttatttacttatcatatgtacttatttactgtttattgtctccttcctatcattctatgctttgtgaaagtggatgtcttcgttttgttcactaatgtatctcaagtgtatggaaagtgcctggtgcatcctaggcactcagtaaatatttgttgagtggcagtaggtcttagctgtaaagaggtggagtacagaaattcagagtgactccatgaaagaaaaaagaatgactccaagcttttttaggctggataatgcctttaacttaatgagtaatttggcacgaggattaaggggagacgaattctggtttaagcatgttgagtttgaggtgaaggtagccaaataaaattgctcagtagtcagcaaagattaaaaaaaaatggaacctagttggaaatgggagagcaccttaagcaaagaaatggctactagcatctagcattcacctcatattctctctctctctctctgtctttctcttttgggggtaggaggattctagtgtcctaaaacgctaccttaaatggagtttttatttagaccctgaagtcctagcttgtatctggagtcctggtccgtttgctgggatatggttctttcctgttttgcaggttcatgctatttttcccccacctctcttagtaaagatgtatatattcagaattacttgtgatcttctggttgtattgaaattaaccttcagacagtgctgctttctctgcagtaatgcgtttgatcttttgggagtgtggttcttggctgagataaaagagaggaagtttcctgcttgcggcctaggcctcaggtcatggttgctgatgttacaggtgtcagctttactatctcctggagctccctgatggctatccttttaaatgcttttcctgttgtttttctcaatgaaccaaacactggtgcagttgtatccctagaccatctctctttttctatttggattgatctaacttaagtttttctttcagttttgaaggcagattaaattcatgtgacttggttgtcagaaatttaatgaaatatttgtttataggagtagtatataagcaccaacatatctggctgtaattagagtctaatcagtgtatctgtgactcacttttcaaaagaggatagttcctaatttacctgatcgttgtgaagatagtgtacagtagtatttacacttagtacatagcctgacaccagtaggtgttcaataaaggggaattattatatatttaaataagtgaaagaatgtcttctgaaagaagaaatacatgtctgtgtaatgaagaactagaattaattggtagactgaaaggcagaattcagctcaatgtaaggaatgactctctaccatagctgtcaaaatggaacattgtaaggtagtatgttccctgtcaccctggaactattcaggcagaggctagataaccttctgtctgagaaattgtagaaggaatttcttacattaggtaggaggtcggacttgtttatctctaagctctgtttctcctctaaaattctgtacttttgggcataatccaagcttccttgcttactggttttagccaaatatagtctaaatatccctaggattcatggcttcaagatgagcagtatcttgttgctcctgtattatacgagaaaagttagtttatccattgattggcttttattttggtcattttccaaaaaaggattttggaagcttgaaataatagcaaattcagtaagaccaaatctactgaccacaaaagataagaatcagtaagtcaaaaagggaaagaaaaagagaacaattatccgtaagtttagctgaggaaagctttagaagttgaacacaatacttagctctgagttttctggtaaccaaggcaagtaaggaagactgataatttgcatagatctcattgcctatcgagaattcatgaggagactgccaccttccttaataaagtggagccccaaatgccaagattgtcatacagggagaatctccaagtggtaaggggttattgctggatctggcaataatctgattcttgttctgaggcttcccctttaacacgtattgagggttcaatttagtgctgctgcctccatctttcttctccagtttaagtctctgatccaagtatgaacacattagtctttccctaatgccaatggaacagctgatgtaaggctaggacatttaaatcaagctttgctaaaagctggaggataatgaatagagagcaacatgaaactatttagtctggcttacaaagacatttttctcatgcccttatcttttggtgtgtctccatttgatacacttcatcagagtactgctaccaaaggcagagccagacatttaccttcaaacaggtgcaagtcagtaagatccagagtgtctttgcttgggtttcttgtttgaagaactgcttcatttctgagtaatggacgttcggaatgattactttaggagagaccacacttatctgagagtgtggccctactgtactggtctcacagtaatcccagtattcatggaaaagataggcacgtacattagcatgagggcattctgtggttagaagcattctgatttcattgggaaaaacaagcttctctctgttcttgagcagaagcttttatagaagtctttgtacatgggccattgaaaaataaagtgaacaattcgggtttatcactcatgatttgtaaggattcacttttccttttttctgcagttgctgtactacttcaggtctgttccagtgtttccttgttctcaccaccaagactgaacctccttatttttgttcatttgcttcaggaaaaccattccatctagatttcctaggtgtaaacctcactgattacataatagtgtatatttatagttctaggacaccttcttcaggcatcctgttacatttctacattataagattcttaaatatgcattgaattacaaataggtccccagggaaaaggcaaaaacgaatggctttttctgcgagaaactaggactaatatagatatttgggagcactgaacatggaggatagagttaaacttgaaaagacatacagagatagaaaagcagcaactgccctttcatttgtatgcaagcacacgatatatgtatgggttttttattttttgcttgatgtattcatttccaaatcaaactataatgtgctctaattgggtctctttgttcagcacgtggttgttgatttgagtactttctccagttgaaaaactgacattttaattttgttattcaatgtgtgatagatttaaataaaaacacccaagattgtgtattgtagatttccttcaacaataattatatataattattttatcaaaataaacaagttaaagtagttttagttattttgtctcattttacatttgggaaaaaaattacaaatcaggggccagagtctggtcatgtttgtcagtgaggaaagacaatttctgattgccagtcccaccaaagcgttggcagattaacacagcattgtagattactttcctaggaagagatgctccttttttctccctttccattattttgctttccttctttccatggtgcattgtccttttgttttcttccctcttatttcgatgcatgtataaacttgagcctttctgctctcacattctttctccccatgatcataattgtttcttcactttattcttaaaaaaaaaaaaaaaggccacataagtattttatgtagatctcatctatcatttaagttttgtcagatccagcctgctcttgccttaccatgggagaagggaaaggagggaggagttttaagggattttaggcatcaggcagaagtcttaagggaaaactctgcgaggaccaacaggctcagaattagctgtgcattgcaaacagatggtgtgtccctgaggaaatagcgtagttgccctaagcaattgggtgcttccatctgatttagcttagtctctgtaactgggaaaaaggaaaatcttatggaagaaatgagtataatcacctgtgaaccattctaaactattatctagagactagtgattattgacttacatatagatttcataattctgcaagatagtcttcggtgttgtatcatcagttatccaaggtataaataacatcaagacccttatgcctctgagcctgatagatccttatcttttaataaccaaccccccactttcttcagtagccatgatgctactgtatcaatgctaccagcaattggaaacccatattcctaatgccaagtctcggcatgtagattttgaggtctgaaaactttattagcttggttacagtacatctcaagcctaagttttcatatacacatagtttagtctcaaagggcaaatgtttccctgaaaggagttcagtcaacactagatgcttatatctttaggctccaagggagtccaaaatttaatgattaaaaatattataaaaatgcaaatatagaaataatacaaaagctccttccttttggtgggcttttctgtccttgcttggttcaattcagctgtgttcttctaggagactgcaaccacaatttaactgctttgctttggtattttgtttgacaagggagatgaatgtttcagatgagacggagtctcactgttgtcacccaggctggaatgcagtggcgcgatcttggctcactgcaacctctgcctcctgggttcaagtgattctcctgtctcagcctcccgtgtagctgggattacaggcatctgccaccacgcctggctatttttttttttttttttgtatttttagtagagatggggtttcaccgtgttggccaggctggtgtcgaattcctgacctcaggtgatctgcctgcctcggcctcccaaagtattgggattacagcgtgagccaccgtgcccggccttcaattttttgctttaagttagaatcctgtttgcttactttttctgacccaaatgttttaaaaatgttttcctgtgttttcatttaaaagattggttttacctctcacattgagatgtatctggagttggttatttattatggtatgagatttttattatttttaaaatacggatatctggttgactcagaaccatttattggtaaaaccttttttcccccagtgtacaatcaccttcatcataaatcaagaggttgtatatgtgagggtctgtttctctgtaatctctgttctgtttgcccatttgtccttgtgccattaccatactgtcttaattattatgatgttaggagtcttgatatcgagtagtgttaagtctttcaaagattgctttggttattcttgcgatgttgtttttccatataaatttcagaatcaacttgtcagttcccactgaataaaaaaaccctgtggggattctgatttgattttattgaatctacagatcactttatggaatattgacctctttacagtattgaatcttccagttaggaacttgtcacttttctccatttataaatacattttaaaattttattttatctcctttgtaatttctatcaataagtaatattttttaagctttctctgcagaggtctttacctgtcttttgttaggtttattcctagtttttagatttttaaaaaacgttttctatttattactggtttaagaatgattttttaatttaattttttttggtatagtgagtaaccttatattagtgaccttgctagattgactaattgattctaatagttgatctgtaggtcacttttggattttccatgtacatagttgtcctctgcaagtaatgatagttctgtgtctttccagtctatcttccttttgtttatttctgacttactacactcagacttctaatacaatgttgagaagtagtgatggatatctctttcttatttgtgatttcaagggaaaatgacagtcatgcaacattaaatgtaatgcctacttttatgccttttatttaatctgattatttcagaattttttttaaattctgcaatttactgaaatttttaaatatcatgaatagctgttgaattttatcagtttactaagatttttaaaaatcatgaatagctgttgaattttatcagtttttttgtttttgtttacatcacctaaactgccaaactcccttactgttttctttcttttttttttttttttttttgagacaggatctcactctgttgcccaggatggagtgctgtggcctgatcatggctcactgcagcctcaaactcctggggctcaagtgatccttgtgccccagcctcccaaatagctgggactacaggtgcgtgccaccacacctggctcaaacttttattttggcatcttttgtacaatgtttttgtatatcctctacctaaaatgactttcctttcttcactagctttccttaagtcttagtttaggtgtcatatttcagagaaatctcccttttctgtcctctgatctgtgcactttgcatcatcatttatcagtggtgtgttctctgcattgtgaatctgagggcaggaatctcaatcctaattatctctatcctcctaaaggttttttctttcttcctacacaggttacattcactgttgtgttctgagaaaaggtgttcaggccttgctttctgcttctaaaattactaactgcccaggaccatcagttcatttcttcaactgtggctccaacagatctttcgctgtttgctggcccaggtattgctctcctctgccccgagtcaatggcagctgggagtggttaccacttccttctcttaccacagttccttctctaccacagttctgttttgtatgtcattcccctagcccaggatgatcagccactttcatttacgttcattattacaccttattatctgtgcaaccaagccagtctctcctacagccactcgtgctttccaaagggaaaggttgaaattttcggttttgtcctacgtgaggggttgtggggagtaggggtggaaatcactgtagattatcaagtaatcctttttttctttgtgtacttttggaataaatctagattatgttgatgtaactgttaggacatttctgtttcttcatctctaaaggagctgggatctgatatttctgttcatattccttccagcatgaacattttatggctaattagatattaacttatttattagggatattacatatacacactgggtgtgtccctacactgttaatttgggttggaactgaaaatatactttctgtgtgtgcctactgctactgtagtgaagttcttgagccaggtctgttcagtcatattgttgaaaaactgtatgaatatttatgaaggagaaagagctgataggtaccatgaacattcactgttgtatatgcatatggtttatattgtgttctgtgtcagtattgcctaccagagctgtctcaacattagctctgattctctgtctagcatctagaccagagactggcacgtaataggagctccaaagaaatacttgttgaaaaagtgcataaactaatttttgaacattttattatgtgctgggcactgtgctaagtattctatgtatgttatttcattaaccctcaaaccttctgagattggtactgtttgttagtatgttataaatttaggaagtaagttgaagaaatttaggttcaaataagttaagtgacttcctcaggattactcagtgcctgactggcaaagataggattttaacttaagtttttctgtctctgagttccatcaacttaactaccatatccttataatacctacccactagtcaaattaaaatctaataagaaactgtgtaaaagcatacttagattgagaggaaataagaaatttggttattgttttagcactcacctttagacatagaagtttctccatttcttttcagggcctggggtaaggcaaagtgtgcacatctgctctgtatattaaaatatcccctcaactcattgaagtggaacaaaaacaaggtcacttgacaggactgtaattgtaatcacactatacagctttacttcctgccctttagtagtaggaccattcccttgtccttaaacatgcttctaaaataccagttttaatggctatatagtctttcatttatgattgtataaggattcattctgtcattgtattgtcattcacataggttgttttcaatcataaaatactgtaatgaacatctgcaagtttagatttttgctctcacctattgtttcctcagacaactgtaagtagtagaattgatggattaaaagatactttttaaaggctctgactcttctaaaatgtgttgttaaactcctcagatctgctaaccagatctttatgctgtacttgtgtgatttatttcgaatctaagtgaaagcctttgtattagttaccctgttaaatcccatcttgccatttgggcagcctattcttagtgtgttttctctgatatcagttaacattatattggctaattccatagaaactaggagactggaaaatgaagataatgtggaaaaacaagagcttgtgaatttgggagtgccctgttcttttaagatgtgatgtgggttaaatgataaacaatgcatcttaaattctttaaaagtggcagaagtaaatggaatttatctggaaaaaaatcaggcgtttattctgatgccctaaattcaggggtgaaatattatctggactagaggaaaattttatgtacattatatggtgttctctattttgacaagcttactttgatattactgctgcaaggtagccccaggagggttgaattgagaagaactgagtattttgaggaacaaaacctaggatagtaggctggagggaattggaggtcagggttttagccatgtatacagagataagcaacatatttaataaaaagaaaaggagaatctatatagtatgctttactccaaagctggatgagggagaaaagaggacacgtctccttgagaagggggcatgtgttgagaatggagaaaaggggtaaggcagattactcagaagaactggggtagaagaataggttggatgataaaaggggctgacattagtccctgaaagttttttttaaataacttccaacttttgccttcacctttgccagcagtgatgtgatctgctttcagctgtagtgaagcaaactgcataaaggacattgtgcatgttaggtcttttacttgcctgttggtacatgtttgtaatatttggaaatactctcactgcgaagaaaagtatagttgtgctgtagtgggtagggtgaggaaaataagggtcatcaccagcaaagtcagagtgatgaaaaaactggattacaacactctgcttgactttgcatagataagtaagccaagcagagtgtttcctggatgtagttaaaatacaagcttggagcacaggtaaaaggccaagaggcttggagatgtacatctgagatgtaccaaagggccaagtgcaaagtaagtttgggaagtttagtgtcatataaaaactaataaagaaagggtggtactctgtctcatatcctgaaacgttttgaaaagaatattgaatttgaccagaagggcattgctagtgaatttcaaagagagatttcagttgagctctgaactggaggaagatgggtgatagaaggctggagagggccagtaacaagggttgaaaaaggaaagagtattcaagcgtatgcataaaaagactacgggtaggttgtgtagatgatgacacactaagcctgggaagacaaggtttcggtgctaatttttatttctttaacaagggtgatagaaatatctgttccatatattaatactatacacaactgtttacctctcagcttttctagcaagacatatgggcttgtgaattaaccctgggtagccctggcattagatagaattaatagtgcttccatatgtgacctcgagacgtactgaaatgaggcaaccaaggaaatcctttatattgggaccaagagccaagatctcaacttgggatatgttaccccgagagttgttaccccgatactataataccatgaataataaccccaagggtcctgttgtctctttttcctcatgtcacttcctttggtactaactgtcaccatgctaacatctgcaaactttgaaaattctgatttattctgcaatatttggaaatttcactgctagtaattgtatttcctggcatggttctgatataattttctgtgtacacagtagcttttccttttagtgctgaatcacactgaaatccttgtttaacctaagttatagttgcaagggagctatcaagacaaataattacagtgatggtgaagtgaatacaagtcaaacatcccaatctgaaattcaaaaccttttgagcacaccaacatgatgccacaagtggaaaattctgcacataagtacttaacatgacctttgtttcatgctcaaaattatttcaaatattatattaaattaccttcagactatatatataaagcatatatgaaacatgaatgaattttatacttagacttgggtcccattcccaagatgtctcattatgtatatgcaaatattccaaaatctgaaaaaaatcccaaatccaaaacacttctggtcctgagcattttgcatgagggatactcaacttgtaatcttttctatgtatagccaagtttgcacatacataggttacaacaacccatcatgtcttaacctttcagtctggaggctggagttttctttttactttgattgtaaattgtattcagattttagaaatgtaaagcttagagaaatgtgcatctcaagattaagaaagctatgcccactgttaaagactggggcatggaaacaaagttggacagtgtagtagaaaggtcctaaacaggggatttggttcttatttttgctatcaagcagaagagtcaaaactgtaggagtctaaaccaaatcaggtccacctgggagtctttaaagttcagggttacttagcatggggatagtggtatagcaaatagttgcgtaggtttcactcgtgggctggtgataatatagtgaggattcacatccgcctgtaatctgggtagaatatttgtataaatcattttggttttttggttttctttttaaaatttttaaaattgttttgcttttcttaagttttggtttctacattaataaaatgacagaactgaattgcctagatgatattcaaagtttcatgtggttctgttagtctgggattctacagtggaattttgtcactacttttgggaagaagtttacctttggtggcctacgaataaaaaccacattggcacaatgccatttatcatatgggataattctgtgtgtttatataatcatttatgttcgtttccaaatgtgttaataaagtacagtatctcatttgattagctcagatgatgaaataggtcagagaggtattatgtttattttcctgatgaaataaaacatcgtagttagcatcttgaacaatttaaatttgatcatcttacttggtatgccagccactaaggatgaaatcctgccactgagaaagaaaacccagtcaggaaagctttctcacccttatctatctaacaaattgtacatattctccaagttctgacttgaatgctggtgaagcttttcttgataatctcttctaccgcagcagagtagaaacactttgatcattcttctcaggactcaggattttaattatctgtttaatgcctttcccttccaccctagtgaactactcaagtgcaaataccttgtcttactcatctctgcacctcatagcccacactgtacctggcatatagagatgcttagtgaataattgcagaattaaatgaaagagtcaaggtgatgtgttgcagagtgaggagaacttgggctttgggctggcggaaggaggtgtcttcgtttacgttttttagattgaaattttgccatgtatatgcgtttaaaaatttaaaacctagttgaataaaaggttggggggggcagtatccaggggccaaatctatctattaataaaataaatttgaattttttaaaaaaatggcaattaaaactcatgttcatggaaaaaattaagttcttattttagtttttccctaaacgatcttgccgtatcacataacagcagtcttgtagtcaatcaagactgacttcaagtggtgaaatggaattttttaattccctgaagagagaaatctttacctagttaagctttgtgttatcttgatgtttttatttgtctagtgacctcttctgattgaaagagtagttaagaaaaaccctttagtactgactttttcaaatttaccgtaatgtaatgacctctttgaaaggagaagtacagagtgtatttttcataatgttacttaaattctgtagacatgaaactagatataaaacccttatgttcttggctcatacaccactataaaccaaatctgcaaattaaatacaaagacaactacaaaaaaaaacaaaattcaaatgaatacaattattccatgtgacagatgatgtttaggttttgcagtagaaaaaaatagctttaggtctaattccattttaaatgtgtttctgtattttaacttcagtgataataaaagctgtgagtagtgcctcttctcatcagtaatgttatgcaggagggcattaatgacttcaaggccttgttggtaagttcaggatgagacatcatacctaaccaaaacacttgacagcaagcattcctcaaatacaggcttataagttttactgagatgtcatccattttgttcattggaagataaggttaatatcttgacattattgaaatcttcattaaatgattttctaaaccagttattgctggaaatgagaatggaaaaacattgcatacctacaattatatttactgctaacaaatgtttgcaaattgtactacacatgtaggacccatatagcacttgcatataataaagtacatatatggtattggctgttaggctattggcttttgaatatgcatgccatgcctgtattgccatatggtcgattcaaattccctttattttttactctttcttttacaatgaccatgaaacttatgctgtgtgtagtgtgccacaaggacatttggcctgaaggggatcttcacacagctgaagaagcagcagtgaaagcctagtgccagtgttgagacagtggctactcatgatcttgaatgtttatccttgtttttagattatctttgaagtgaaaatatgttctcaaaccttgtacccaacttatacatcctttttttctcccagcatatttgggagacattgttttagcaaatatttttctgatcactatctaaggagccaggattcagagatgtgaaaaacaaaacaagcttggcccttcctgaggcaatgaaagaccctttaacagcaagctataaatagattgatttgtgctgttctaaaggtatgcaaagagcactatggaacatattgaaaggagataccaattattgtgaaggtaagggcgaggtttagagcacataatggcaaagatcctgttgaaatagggtcttaaaggatgagtcagataagaagataggtttaaactagacagagagatggtatatgtaaagaccaaggtcatgaaagacattattattataatggtgagaggtgtgtggccctagatagcatttgccatgtgagaagtaaattggaaccccaaactaaaagtcttgttaggctaggtgtttagcccttatctcatcagcataggggagccatggtgatctgagaactgggagagtattcagggcaatattttttatgtatagcggttaccacattgtattacagtgttctccttcacttgtcattggagctcttcaagtgctgtgaccattagttattaatctttgtgtgctaagcttttggtagagtaactgataaaagtaatgcttagaaaacatgggttgaatgactaatcatgagtaaagaggatttaggagagaattatgacaatgtccttcggtggtagttttaatgctttgtgggtcacagactccattgtgattgacttggaaagcttttccttgaaaatgtaaatacatataacatttggcttatagttttatgggattcatgtacctctgaagccagtccatgaattcctggttcagaattcctccttaggaaatcatacccagacagccatcaccatcacaccttgtcatgaataattactgtctcttttagcagtctttattacgattgtgtctctttcttgtcatttccttgagtttctttcatacttaggaagcaaatagctgacctgtctatgaataaagaaagcgtttttaataatgattaaggtaaaactttactggtctgtaaagataatagacaagtatgtgaattaagccagcaaccaagaaacagctacttgagggagaacctgacattcctgaatttgagttgagcaagtgagttgggagtctgcagggccatcctcagacttggtttgctagaaggactcacaggactcagaaaagctgttacagtcatggttatagtgtattacagcaaaaccatacagttaacatcagcaaaagcaaaaggcacccggggtgaagtctaggagaaatcagacacaggtttccaggtgtcccattccagtggcatagcatagatggccttaattctctcaacaacaatgtgtgacagcatgcacgaagttgtcaaccagggaagttcgcttgagccttggtgtccagggtttttactgttggtcagtcacttaggcttgcagcatctgcatgacaggcttcagcccctcagacttctcctacccggccccccagcagtaataggtgttcactgtaaatcacattgttagaataagctgtctgacaaaattggtaccatgtgacccaaggcctcaggcatacagaaatattcttatcagggagaatattccaaaggttcagagctcatctaccaggagccagccaaggccagttttgaagacaagtctttcttgggaatatgcagggtttgagcaactcagtcctgctgagttaaccctttcttgtacagcaagttagctcttcagggagttagctctgtctatcctgcccctgtctgcctagccactccttttctaggtagagtggaccttgctgttcacgtcatagatggccattccgtgtacctagactcctttttattcctttgccaacaagtaattggaatgtttggatttaagaacatgtctgtgctttgcaatttcatgtgaccatggtgaaattatgcacacattctatcattgtgattcaacaagtattttttgaatgctgctgtgcatgaggcatggtgttagatggcagattgacagaaatgactaatacaggtatctggcctcaaggagtttacagtttcataggagaaagaaaaacaaaactagcaattctggtaagcagtatgtgttttggagagcacttaacttcatcagagagcatggttgaaggtgtatctgtgtgtatgagaaggtgttggtgataattagaaggcttccctaaagaggtcactcctggggttgagccataaagatcaagtagatacaagtgggcatgaagctagtattttgctgccagtcatttctgtagttaggttgcctatgtggttggagcatgtatgtattgttacaggtgtagtctgcttggcttccctaagagaatgccccagtcctggccagaatatacatgtcttttttagggtttgcaccaaggggaatagagagtgtctggctcagtacaaatctgtttccgttactccattatccagaaagccactgaaatggcattagcctacacttaatgggtggtagtgttttcacacattgcttctcaaaggaggagtatgtgaatgtttagtttgggcctggtaaaaaaaaaaaaaaaaaaaaaaaagtataaccattacaaatttaaatgtactttgtttctaatgggaaggcaaatgcttgccttgctttgatgaaattgaacataacaaaatttttctatacttggaagcaaaaaacttcaggaaaaaacctgggtccaaatgttgctacatttccttgggcttccacgtgtatgtggttcttaatataatttgaaacttctaagagcaacaaatagttgttttttgcttctaagagcaacaaacagtgcatagaaattgtgtgataataggatcaagaatgtattattagagtgaatattggataatttcaaactgttaaccttgagattttttctaagaatctttctctttttccagcgttacagtgtttctgccacctctgtacaaaagacaattttacttgtgtgacagatgggctctgctttgtctctgtcacagagaccacagacaaagttatacacaacagcatgtgtatagctgaaattgacttaattcctcgagataggccgtttgtatgtgcaccctcttcaaaaactgggtctgtgactacaacatattgctgcaatcaggaccattgcaataaaatagaacttccaactactggtaagttgtataaaatttttttcctagatactacaagaaaaactcttcatactctgtgattttagaactggaagggatcataaaaattgtctaatccagctcattccgtttagaggcaagaagtgacttgtccattgttacagacttataagagtaaccaagatcctgcctcctgggtatgtgttgtttaagaaggtggttccagggtggacttcctctgaggtctgttatacctaaaaggatagataaaagcaaactctgacaaagcccacaacaacatcttcagattgtctctactttgttctcagagtgaatttcttcttccttgtataatgctcctatcttttaaagcaatcacagtcttttaatgagtggggattcagagcagcacttaacagtctagatgttttcattttgtaatttcagcttgttttatgatctttttgcgtaaattaattatacatgatttctagatttttggtccttcacctgtagtttacatttaaaatttcctggggctgggtgcggtggctcatgcctgtaatcccagcactttggaaggcctgaggtgggcagatcacttgaggccagaagttcaagaccagcctggccaacatggcaaaaccctatctctactaaaataacaaaaattagctgggcatggtggcacatgcttgtaatcccacctacttgggtggctgaggcacaacaatctttgaacctgggaggcagaggttgcagtgagccaagattgtgccactgcactccagcctgggtgacagagtgaggctctgtctaaaaaaaaaagataataaataaataaataaaatttcctggcagaaccagcagtttgaagacttcataaactttttaattttaagattccggtttaatatggaagtctgagcacatgtatttaactcttacctctttccccagatcccaaaggaatataaaaatgagggcaacctgtattaatgctagtgggattaatggtagaatgccacccacatgccagcacttgtgaggaacttctgcaatttacagtacagatgacaccagactagtaaagaattgactagccatataagaaaggttagtcatcgaaaagtccagccaataacttagacaaaggatttggggggtgaggttagggtatgggggcaaactctcagttcccttttaggaagcacctggcttcagtgctcagaggagcagacacagttgctcactctccactcaaagttggtccaggccttgtgctaattaaaggaggaagcactgctgtagcgcagaaggaaaaggccagtcctccacctgttcagcatgataatgcagctcccctgtggtaagggttggtcggactacaatatctttgtgactttgatgaaagcatctgcagttataatgtggcaaagaaaaggataattccagaatttcccatttccatcatttgagcttgaaatatctgaatagatatttacaaaaccttgtgaagaagtcaccttatttctcatgtttctaatgaacatatataaacttctcatttccagctctaggataagcaaacagcaaaaaattaccaatgaaaagttaggagttcaaaagaagtagtctgaactagatagattagatgtcatcctgtgaaataggtttaccacatgatagggaagaactttcaaacagtacagggtctattttcagttattcactatgaaatgagaacatttcacagttgttaaaggttgctttcagaagaaaagcccaactgatgaatgtttttaaaaatgcactattgagagcgaacaacagactggatgccataattttatagtcaagtttgggacaagttttaagaaactgtgttacaattcagagaaaagacagttggtgagcatattaagagatatagggaacagatttagatgatccaatatgcttattatcagaattccagaaaaaggcatgaaatcataaagaagacagaataccaggcaaaattaatgaaaaaatattaatccaaacacatataataaaaagtatcaatttcaagaataaaagaattatataagcatttaacacacataaacattggttacctgtaaaaggtgaaaaaaaaaaacaggttcagattttctgcttaaatatcaaagggcaaatggaacatttttacgatcacctaaaattcttgaaataggccaagatttttcatatacaaaggcaacagccttcttgccacaactaagttcagtgtacaagggtgcatggactcttcctgaaagaaattactagaaataggattctgtatgataagagattaatctactgaagatcttaagaatgggaaagatgtgatatgaaagaaatggtggtaagcagtaaaccagtaagactcaggatgaatgtcaaaataattgtaattttctgaaacaaccagaaaatcttaattattaatagaagttacaagaaaatgatctggacttaaaagtccaggaggttaagatagtataaaaagtatatatatgcaaactctgttaaaaaaaaaaagtaaaagatatgttctgcctttaaaaaattggtggacctattggccgggcatggctcatgcctgtaatcccagcactttgggaagccaaggtaggtggatcacttgaggttaggggttcgagaccagcctgagcaacatggtgaaaccccgtctctattaagatacaaaaattagccaggtgtggtggcacatgcctgtaatcccagctacttgggaggctcaggcaggagaatcgcttgaacccgggaggcggaggttgcagtgagccaacatcataccactgtactccagcctgggcaacaagagtgaaaatccatctcaaaaaaaaaaaaaattggtggagagatatatactgaaatgtgagttgtttagaagtgatgaagatgtatgtggttttttttttcgcttgttttgatattttgttgttttttttgttgttgtttttcttgctatgagcatgtactggccttggaacaagaagacaagccaaacattaaaaaaaatatgatttttaaggagatgttaataggtattgttacaggttattggtattagtgacctgatgtgataagtggggaaggtcctatgatattggcggcagttggccttgtaatgatggctgaagaatacaggagtaagtgggtgctgacagagctggtgtgcataaaaggaggcctagtgggagaagactgattcacttgttctgggtttgagccctgtaaactgctgtaatgaggctctttggctaagtggtggcagtggccagctgcaggaattgtgtaggattgggaaaatgggggttgccacctacagtgtttttgtcgttgttgatgtttatttcactcgaggccctttttcagtaaagtcatcacctggccttggtcctgtggaactggcagctgtcattgctggaccagtgtgcttcgtctgcatctcactcatgttgatggtctatatctgccacaaccgcactgtcattcaccatcgagtgccaaatgaagaggacccttcattagatcgcccttttatttcagagggtactacgttgaaagacttaatttatgatatgacaacgtcaggttctggctcaggtaacataattgtttctcctttttcctaagacatctttttaaaattaagcgatacttattttattagttttctaataagccaacttgctagaatgtgagatagtataaataatattgcaggtttgaacctaataaaaatctttaagcttgatgtatatatgactgtggctggtttaaaatagattggaacttaactttaactgttaaagcgaatcaataagtcagctccatggtggtataaatttcaaagcgttctcacttgtataatctaatttgcttttcatcactgtgaggtagaaaggataagaacaattattctcatatagatgaagctgaaggtcaaagatattcacatgatctgcagctaacccattctattcaggattgtttagcagcttgatgtttacatttgaaaacaggcatgacagaaatgtattcagaattgtgaaggttatttactttttaaacattatatgaaattgtctttcgtataggcctggttttttaaaattaaactaatgaactcttatgtcattttctcacttgagaaaaatgtctaaccaccttcttatttaatgtagttttggcccctaatgacgttttcttttctcagttctatttgttgatatttgtggcatcagaagtagatgagctaattgtcagagtcatcccaaggtggattttggcatagcagtgcttcatgtttaaactgaaagggggttatcttttactttttcttgcatgtggtttggaaaaatattaagagaggaacactcctatcccctgtgtttttagaatttgacacttggtgaagaataaatagatctaggtttcaaggcaagctttgtcattgattggctgtataaccttggttagaacatgtttcctctttgggcttctgtttcctcatcaaaaatatggaacccatactgttgataaaaacacttcaagtggtttgttaagacttttaaatgagatgtactatcctttgaaaagtatgagtcatcttcaaataagggctaaattcatgaataaagtgaaaatttgtaaagcgtatataatgaaaatttcactaattttggtgaaagcccatctctattaaaaatgcaaaaaaattagccgggcgtagtggcatgcgcctgtagtcccagctactcgggaggccgagacaggagaatcacctgaacctggggggtggaggttgcagttagctgagatcgcaccactgcactccagcctgggaaacagactccatctaaaaaaaaaaaaaaaaaaaaattttcactaattttataattgagtgatattaaaggaatgttaaagcagaagttgtgactgggtaagaatataattctgaagcataaaatcacatctaatgttgcagaaagctcatataatgacaaatgtctatttattttaaggaaatgaatatatattggtatgtatgcatatccattcatttaagaatgaagaaactgattttattacctgaattattcttctatagaatttggccatatgtattcaataagagagctctctccttgactactaggacacacacaggctcgcactggagctcacgtcccagaaggcaagcttagggattcctgaaacagttgtgcaaggaagacaatgagagtttggacttagatgaagcagtcttagtactgaaggtgtgatagtctttaggcaggcctggtggacagaggttattttagagctttcctgggacttcccatttattctcagttcagatcttcaaaaagattttgctcattctggaagtcatcctgctcaaaactgtgataatcaaggaccagagtcacagaaaatcaggatggctacagatatttggaattaatccctcaaacctgttctcttgtttctaaacttatactccggaaagacacagcactcatgccacttgccacagtggaataagcccacctaactgattaaaggaattggtgggtgggtggcagttgattactggataagaatatcttcattaaccttttaagatataaacatgagaaacaatggaataattctgtttccattatatatatatatatatatatatatatatatatatatatatatatatatatttctagatccatgagggaccatagctctctgttctctgaaagcttctctccctcctttgatgccttaccctgcaaaaacttgtctgcattgcttgctagctctgtggctttgggcagttaaccaatgtctcatgcttgagttatttcatctttaaaatgaaagtgatggattctgtgcacatcattggattgttgtgagttcaagcaagacaaaatgtttgcatgaaagcacttggtaaattgtagagttatgtccaaatgacaagtgttactcttattgaaaacatacttggaggaaaaatctaacatacagtatcagttgaccacattgtacaaaacttagtttaaggcctcctttgcctgtcatagttcattgtgtactgaattccctccaaacctatccaggcagaagccatcttctggtgaataatagcagaaaatgccatctgtttcccttctattcattataaatccttaatgccaccttaggcatgagactagtgcctgtgaataagtaaactgtgtgtttgtaatactctgtttttagttctttcattaattgaggaaaaggtataagcatttcacattctgaattcatatgtttattacttagtaccgtgaccataattaaggaaaggccctgtctctacctctaaagactgtgcttttaacttgggaacttcagggaatacaatgaagagctgggttctggcagctgtacgccaagtgtgtgagtgtgcacatgtgcatatgtgccagcttttgtaagtgagtcttctaggccagtgtttgttatggcgtgtgcagcttatgagctcttgtaatatatgcatgttgttcgggtcttatttcctgttcactgcatgtaaagctgtggagtccctgtttcccttttgaagttttctctcaaacagttctaaaggtacagaagagtagagcagagaatatagagatctaaattaggcctattcagttttgtctttagaagaaaattgttactttttttttttttttttttggagacggagtttcactctgttgcccaggctggagtgcagtggtgggatctcagctctctgcagccttcacctcccgggttcaagcaattctcctgcctcagcctcctgagtagctgggattacaggtgtgcaccaccatgcccagctaatttttgtatatttattagagaccaggtttcaccatgttggccaggctgatcttgaactcctgatctctagtgatccaaccacgtcggcctcctaaagtgctgggattagaggtgtgagtcactgtgcctggccaattgttaactttttaaaaatgctcaactattcatgtgaagtaatccaatatagataatacagtggatcaagatttgctttttaattttaattgacatctagaatccagtgataaaggggaagacaaaacctttcctcgtcctgttggcctttcttgaccataccatttacacaagtcctgaacctgtcaggtgttttcagaatttgtgtttgtgattcctttttcttttttattacttgtctttgcaatttccagattagtctcctgaaattaactcttaagtgtacttttaagtctgtggtgtggccctctacaaggctttcataaaatgtaataaattagtatctacactaaacaacataattagaattgattatacatagtgcgaaagagctctatgatttaaataaggatttctgacagatctgtttctaactagcagcctccttataaacacaaacagttatttatagttatactgctaactactttacaggaggtggggagggtagagcaagaggaagaaaggacccgtttgagaaacttaagaagaagagcttctgatcgctttaaagatttaacgtttggatttataagcatttcacatcagggaaccaaagagagcagataatttcatttactgtcattgggttaatttgatctagtaagcagctttgagtatagattataaatgacaccaatttatatgtacatagattgtataaataagatatgagtgaggaacatgatgtacactggcattttctttgttagtgtcaatgtaatttaaaatgacacttaccggatggtggataggatattaagtgatggtctcacatatagtgccacttaaatgttgcaggtaagttagtaaacccttttaaatgaagtaagtatggcaatacttaaaaatacatattttggagaaagccaagttccattagtggaaaaacagtgctccattaccaaggtaagttacttagccttgttcttcaagatactagtgttgtctatgtagccagttgtcagcaagtaaattgctttccttgaaatagtttctgtggtgatttttactgacttatcaaaaagccagaatttacttctgtgtttctgcgttcacatccttttttcctcccatcagtgaaactgttacgagattcatctttctaaaataagattttaaaattatcttgcttccagccatggccctttttctcagaaatctttaaaggttcctcttttacctaaagctcttcattggttattttgagcttggtattcagtactcttcatcttctggtgacagcttactttctcttttcactgctttgccacatatatcctctctctgattgcccaagctgcttccctaaaaatgtgtcattcatttccctctacctttgcctgcacattcttcctgcctaaccaccgtacttaagggatagtcaaaattcaacttacttttacaaagcctaccttgaccctctagcaggagtttctggattcttttattatatttattatcttattttccttttttaattagttattttattgcaaatataatatctccccagtgagataaattcctaaagggatagcttaaagtatcagttttctgggtcactcattagtgcctatcatgatgtttgaaacatgtaatattgttgattgtgttgagtactatttatttttacctttaggtttaccattgcttgttcagagaacaattgcgagaactattgtgttacaagaaagcattggcaaaggtcgatttggagaagtttggagaggaaagtggcggggagaagaagttgctgttaagatattctcctctagagaagaacgttcgtggttccgtgaggcagagatttatcaaactgtaatgttacgtcatgaaaacatcctgggatttatagcagcagacaataaaggtctgtaacatttgcttttccttatgttatatataacaagatctctttaagtctttacagatatggtgactaaccatcatcaaagtagatgagacatagatgtctctcatgtagattagacccattaagtcgaatacaatatattagtaacttttagaactaggaacttcttcaagattttcttgactcttgatagcattcctaaaatctcttaatgttttataaaatataaaagagctattttaaaaagccatgtactttgttggtttagtttagggcagttagttattgagagtactcatgatatagaaaagatatataaacttgctcaaaattttgagaatagggctcagatagctgtttccttttaatctcttcctgaccagtaggatgtttcaatatggactattgaccttattaatggggagagtaaaaataacttgtcagtgttctgagttgccaagggctaaatagatgaatcttctggcaaactcaaagagataaattgtttcttcaaccaccctggtaactgtacggacacttttctgcctatcatgctggtgcctgaggcccagtgtcaggtcagatgctgaagaaggaaggaagcctgtcagcagggagtcagaatgagtggggactgcaagcagtgaccttagactgtgctgctgccactttcttagcttccgttaatacctttatgcccatgattcctactttttttttttttgagatggaatctcgctctgtagccaggctggagtacagtggtgcaatctcggctcactgcagcttctgcctcctgggttcaagtggttctcctgcctcagcttctcgagtagctgggactacaggcgtgcaccaccatgcccagctaatgtttgtatttttagtagagatggggtttcaccatgttggccaggttggcctccatctcttgacctcgtgatccacccacctcaccctcccaaagtgctgggattacaggcatgagccactgtgcccagcccccacgattcctatttttactgcctctgtcagagacttgtgtttcagctccactcttgtcatccctacccctgaatcaaatgtatttcccagctttcctatttaaaaaaaaaaaaaaatgctgtcattatctcttagcttggccagacctgtagtcatctttttccttctcccaccttccatttacttcagcaatatttatttattcaaatattaacagtgtttaacctcagttggtaattatgggtgatttttattatttttcttttagcttctctgggttttcaaatttatttacaagcatgtactgcttttttttgttattgacttttatttgtagaaaatttccaatatgtagaaaagcagagtagttacagtgatccctcatcgtccagcttcaacagttgtcaggtcactgccaatcataattgatgtctgatcccacctactctgccctaactgtgttatttgaagctggtcccagacaatatgttttcatctgtaaacacttataaaatgtaatttgtatcttcaaatgatgaggaaatgtttttatgaaacaaccacactaccattgtcagttttttaaatgttatcaaatatccagttaggttcaattctataattgtctcctattaaaaaaattatttattcaaattatgattctaagtccacaagttatatttagttgatatttctcttatgtgtcttaaaatttaggtccccccttcatcttttttctcctctcgcagcttatttgttgaagaaattggattgtttatcctgaagggcctatcacattctggattttgctgattgcatttccatagtgtctcttaacttgttcttctatcttttctgaaaactggtagttagatttagaagctaaacctaattggagttttattggttttctcaaaatacatactaaggatattatatacatcctattgcatcatatgtggaggtgtatagtgtttgattaagacggggcagtgaggtatatgatgaatgtaggtagcgattatcagtggcacctgacaatgtaatacctcttaagttaaaaacaaaacaggccgggcacagtggctcacgcctgtaatcccagcactttgggaagccaaggtgggtggatcacgaggtcaagagttcaagaccagcctggctggccaagatgatgaaaccccatctctactaaaaatacaaaaaaattagccaggcatgatggcaggtgcctataatcccagctacttgggaagctaaggcagagaattgcttgaacctgggaggtggaggttgcagtcagagctgagatcgcaccactgcactccagcctgggcgacacagggagactctgtctcaaaaaaaaaacaacaacaaaacaaaacaaaacaaaaaatagtaatcagtctgaccaaatccttagttctcattttcgtttctgcctttatcaccatttatttcctcccccaactcttaaaacaaccttttctttatttactgtgtttgatgaccctagactttccttgttccttcttacttcttcatagttgtctttgttttctcaactcttactcttctcactggttcatatgaaggtactgattttataagtggtaatttcttccttaagaacatagccacattcatggtttcaaactctaccatgttggcaactctcaaatctccatttgaaagcttaaacctcacccagggtctggattttgtcacattccaagttacaaacacagcagcacaaaatgttggtgagtctgtgccctgaacttctaaccaggctgatgctgtcatctggtggtcaccatgggaactagctgaccctactggctcttccctactccccttctttcttctttgtcaggggttaatgtactttctctgagcctagcccctccacctcagttcctttatcttctcctgatttagttaattccacccccggcagccctttatatttatggccccttacatataaccttccttctatcttgtccataacctgtggtttccctttcttccatctgcctgtcttccactttgtttcttgtatttgtgagcttttcaaaattcagtaatggttaagaggcatgcaaataagctagtgatgtgcctatatcaaggaaaagcaagggtgcgagtttggtcagaatcagtttataaagttcatgaagaacaaattaatactaagtccttttaaatgtacccagaaatctcctccagaatcttctgaaaagtttctattcctttcttaatctcttctaatcagagttggttttcttcttcaaccaaataccttcaaaatagaagctgtttcatgtcaatatggattttttcttttggtttacaaccagcagggaaagaaagagcacagtttatgtacttcttacctaaagaatctagcattccgttttttaaatcttaacagtcttacaaagtaagactttattcttgtataaaaggagaaacaggctccttgtcagtaacaggcaggccgtggattccaaccaggttagaatgactctaagcgtccatcttttactggattgtgctgtctcctaatgttgtaatgctttttttcttcatggcttaattaagcatgtggttttccagctacttctaggttaaattagattgtcgtggaccagtctagcttaggagcctagctagtgtctttaccattattcctatgagaaaacatgttttaaactcgtgttttggcttacagaggaaattttggaacccacgttcctcgttgtttgagtttagtcccagcttttccagttttgctcctgacatttcagttcctatttcagcttccccatgtgttagaggtatcactatttctgtttttctaagctagcaaccttggaatcataatcatcttgtcttgcgtctttgtgaactgtgtacacaatctgtcactaaagcttgtcatttcttgttgaaactcactttcagttttgtcccatactcttccattcccactgtggccacactggtctccggagacttctcacctccttgcttccctctctgttccttccttttttttaaccttctctccttccaggaacagccactgagcacccaacccgacccagagatttttctaggcacttaagagtgccagctctgataccaattatctgtgaagactcaaaaaagtcaccatctttgtctcttaaatgggattaattatacttgccttatctcaagaagaggggcttactctgaggaactaaaggatgtgtacataaaagtataaaacaaacaatgtagaagaaaatgtgaaggaaatacagacttaaggtggcattatattgcagtgtgtgactcaggattgagagtaaaaagtaataaccattgaacaaataaatcataaatggtctgcagcccaaccgaaatgttaattctgttttacagacaatggtacttggactcagctctggttggtgtcagattatcatgagcatggatccctttttgattacttaaacagatacacagttactgtggaaggaatgataaaacttgctctgtccacggcgagcggtcttgcccatcttcacatggagattgttggtacccaaggtaattctataagcagttctattatttaagctttaaattttcatgaataatgtctatgaaaatagaaggtggaggctgggcctggtggctcatgcctataatcccagcactttgggaggctgaggtgggcagatcgcccgatctcaggagttcatggccagcctgggcaacatgacaaaaccgcatctctaccaacatacaaaaaattagtcgggcatggtggcatgcacctgtagtcccagctactcagggggctgaggtaggaggattacctgagcctgggaggtcgaagctgcagtgagcagacatcatgccactgcactcccagctgagtaatagagagagaccctgtctcagaaaaaaaaacaaaaacaaaaacagtaggtggcctaactggagatatttaaaacaaattttttagatgagaacattttatctttcagttcaaaatttcaggtagagctaggaatctggaaatttgtttagagattctctagtcgttgtaacaaaactgtgattttttttgagttcttaaaagtagcattcaatcttatgatttttgaggatctcagtttcagaattcaggtccaactgaatatatttttatgtgtagtatcaaatgaaatgtgaaagtgctttgtaaacatcaacatgctaggtaactgttatctggccatctaataattatatttgaccttgagataaggagactgcatgagatagttttacagttgaaaaattaaatactaagttttagttatgacatttgtatgctgtagtttttgtgcatgtgggatttcagatgccagtatatctctctgctctagcagttgtccacttgcaacccaatggctcccccactccccactttacatacagcataagtgctagttcacatcttagctccatctttgtagttattattattattgattgtaacagttttattgagttataattcacatcataaagttcacccacttaaagtgtaaaattcagtggtttttagaatactcagagttgtacagccagcaaacactacagtcaattttagaatatcttcactccaaagagaaaccctgtagccactagcagtcactcccctttcctcccaaactccttagccctaggcaacaactgctcctttttgtctgtagatttgcttattctgcacattttatataaatgaatcatacaatatgtggtcttttgtgactggcttctttcacttagcatgttttcaaggttcatttatgttgtagcacgtatgagtacttcagtcattttgatggctaagtaatacttcagtgtatggatatggcatatgtcatatatccgttcgttgatggacatttggtttgtttcttttggccattgtagctaatgctgcagtgaacatttgtgtacaagttgtatgtagtttcatgttttcagttatcttgggtatatacctaggagttgaattactgtatcatatgataactctatttaatggtttgaagaactgccatactattttcttaaagtgcctgaaccattttacattcctgccagcagtgtatgaaggttccaggttttccacattataattattattttttaataacattttctagtggttagcatcaaagataatatacttaatactgagtacattgcagttgatagggaagtgatgttctacatgcttggttcctgggctgctggaatatcagtctatggctaagtttcttaaaaagaattcataaggcaccaacagataaactgataactttttttttgccccagtctttgagttgttcatcttttaaagcatgttattgtccacattttctttaaagaaatataaattcagtgacttttggtgtagtgattcacttgagtttaataatgccgtaagtattgtaggtcatgtgggctgaaatgctttgataatttgggttgggagaagagacttttgaacctaaagatgtgagttgtgattggtattaccttttaagcagtcatgtttaatttttgattctttaggaaagccagccattgctcatagagatttgaaatcaaagaatatcttggtaaagaagaatggaacttgctgtattgcagacttaggactggcagtaagacatgattcagccacagataccattgatattgctccaaaccacagagtgggaacaaaaaggtatacttttgaacaactatatttaatatcttctgaaatcaccttttttcccttctctttcatatatacatatcattgctgaaactcagcttaaacttgcactttattagattgccaacaggtaagaagatctcatggtcttgcctgctctgaagccagagttacctgacttaaaaagatgcctgctgatgaaaggttgcccttccagaaaatatcattaggcatgttaattataataacagtagtaactaacgtttatagggcacctactatgtgccaatcgtctaataggtcttttacgtatattacctcatttaatcccttctcaaatactgtgcagtagctagccctgctattttcatatttcagttcctaaaaatatgcctttcttgctttcttagaacttttgcacatgctgtctcctggagcatactttaccctactgtttctcagcctcatacccacctttcccgtaggaagttttttctagtcctcaaaaatcttaggagtccctgccagggactgtcatagcacactgaactgggaccgttgaggcacttatgcgttatgttgtaactgtttatttatttgcctatatattctattaggtgcaagctgcttgagagcagccttgtattcccagcatccatcacagtgcctaatacatggtagatcctcagtagatatttgttgagtccatgagtcttcaaaagaacttaattaggtaggtgttattaccctttaattcacagatgaggaaaccaccttgaggaggttaaataatatggccagcttcatgtggatgataagccgaagagctgagatttgaacctgggcatttctgacccaaaccccttatcacaagctgtcacagcattttttcaaactactgtcttggccttggagacagctggagagccagcagcattagtctattcaaattgcatgtataattttgagatttctggattccctggggactctcaattttcccatccaagtactaagcaggcccgaccctgcttagcttccaagatcagacgagatcgggcgtgtttagggtggtatggccgtagatgactctcaattctcaaccagctaaggggtccttgtcagtggttgctgtaggtctctgtgggtcctgacccataattttggtaggtttttgaagcttcagtatgaggactggcattcttttgtatctattatttttttccctggagtatattcgtgcccttcctttcatcctcagtgagaagacttctaaattaaaatgcatggtttctacctagtacgtgtataggtggtgtacattaggacacctttaacagtcacaattgttatgtatgtctttcattggaaaccaagatcatgaggcagatagtgtgaaactgctattttagcattttgtgggatttagttgacatcattaatgtgcaaaccagtgtggatatttaatatttttcttgagtctaatatttgttatgtaatattgtgtacatatgtctatgtataaagaaatgtctgaaaggaggttcatccaaatatggcagtaaggggatgattttcaaagttctttttgcaaattttttttaggtacatggcccctgaagttctcgatgattccataaatatgaaacattttgaatccttcaaacgtgctgacatctatgcaatgggcttagtattctgggaaattgctcgacgatgttccattggtggtaaattgctctcctctcccccagtagtttgtcatgagcagaagttgttcaagaattgtcttctttttttaattgaatgaaattatgtacagtccattatctgaaacaggatgtcaccgagtgccagagaaaacaaaggcgatgaaacctttgggaggggacagtgccatggtgtgcacatgcacagctctagcctagtgtattctcttcctgtttccatttgaatctggagactcatcagaacccaaccccttgttatattggaatatagttctttagaatggacagctgcttgagaggctcacctaggaagctgtttctagcatgtacctgggtgtcaaacttattttttttctttgagattgtggttattttctccaacttgatagttacagttacatacacagaatacaattatgttaccattgtgttgtattctagagttagtttgttttaacttctagctttttagatggagtacttttaatgtttactcaggaaacagtctcttaggcttggggacctagacttggctgagacctagtgccttaggtttttgaagcagtgagggacagagtatttctctgtattgtagtaaataggatatattattgacagatgcaagtagagaaagggacttggcaccttaaacttgcctcataagattcaagtctcactgatagggtatatatatccctgtgcaagtgagagcctgtgcacttacagaatagaatctcatttgctgcacaatagggttctaggggaaaatgtcaatctggtcatcacagctcatagtttactgtcatttcaaataggctttattgatctcatggcaatacttagtttcaaggtgtgggtggaatatcaactcagggaagtggcttgtggatacagatgtggatgagatagagaaagctgtaatctctgttccacatacctactttagtaatgaaacactgtaataggtctctcaggtgatcttttaatgccttggcattagctgaataaattcatcaaaatttaattttttttaaactgatacaggaattcatgaagattaccaactgccttattatgatcttgtaccttctgacccatcagttgaagaaatgagaaaagttgtttgtgaacagaagttaaggccaaatatcccaaacagatggcagagctgtgaagtgagtatttctttttgatattaggcaattttctaaactgcttctgcttagtaagcaaaagtttgctacttttctttaaggaaaacttttctttaagaattttctttttcatagcagtcaaaccaatgtttaaaaacagaataatttggttttcatattcaattgtaagcacattgaaagggccatggaacatttgcagtggcctttagtgtatcagaacatagtttagatctgccgggcgaactaaggcacatatttttaaatgaatgcctcccttcagccggggcaacccagaacactagacagttaccggacatgaatgaggagccctgtattctagaccagcctggctaccatttcaagggtctgactctgaacaaatccctttagttctctggactttaatatccctttgcaaggtgaggaactcagataaggtgattacaaaggtgtttcaaatgattttccgttttattcatctgattgcccagataaccgttaaccaggaatttagggaaaatgcttttttccagcagtatctgagctgctcaacttcagctctaacaaaaagttttagaaacgtttttgtaattgtaaatttaaagattcgtaagatgaattttatttaacctctccttaattgctagctgttactattacaatattggtgaagcagagcatattcctccaggtttgaagatttgtagcttaaaaaggctataaaaagctgttcagttcagtagttgattttacgtcttaaactattgtaggactcagcagaacctctgataagcaagagagcttgctacctccaacaaaatcacatctccaggcccaaataaataaaatgtatttcagcatgcttaaggaatttgcatgtgacatagtttaataaatgagagtgctgctagattttgtcttttagaaatttgatctacttgggaggctgaagtgggaggattgctggagcctgggaggtcaaggctgcagtgagctgagggcatgccattgcattccactttgggcggcagagtgagaccctgtctcaaaaaaaaaaaaaagaaagaaaaatttgatgtgaatacttcaaagtacaaacttaaaatttcagtgtgaggtcagatttcttctttgctttgcccagctctggtttaggattcggccttttcaggtttgctaaatgagtcactctttgtccacctgctttccagcactggcaccagtaccctattgatggaaatttatgtaatttctactcatttgctattacaaataatgcttaaacaataacaagtgtatatgtcatttaaaaagaaaatttacacgtaaaaattcttatccagaccaatggaaaatggtgcatgcattaatttttttttttatattttcttgtaggccttgagagtaatggctaaaattatgagagaatgttggtatgccaatggagcagctaggcttacagcattgcggattaagaaaacattatcgcaactcagtcaacaggaaggcatcaaaatgtaattctacagctttgcctgaactctccttttttcttcagatctgctcctgggttttaatttgggaggtcaattgttctacctcactgagagggaacagaaggatattgcttccttttgcagcagtgtaataaagtcaattaaaaacttcccaggatttctttggacccaggaaacagccatgtgggtcctttctgtgcactatgaacgcttctttcccaggacagaaaatgtgtagtctacctttattttttattaacaaaacttgttttttaaaaagatgattgctggtcttaactttaggtaactctgctgtgctggagatcatctttaagggcaaaggagttggattgctgaattacaatgaaacatgtcttattactaaagaaagtgatttactcctggttagtacattctcagaggattctgaaccactagagtttccttgattcagactttgaatgtactgttctatagtttttcaggatcttaaaactaacacttataaaactcttatcttgagtctaaaaatgacctcatatagtagtgaggaacataattcatgcaattgtattttgtatactattattgttctttcacttattcagaacattacatgccttcaaaatgggattgtactataccagtaagtgccacttctgtgtctttctaatggaaatgagtagaattgctgaaagtctctatgttaaaacctatagtgtttgaattcaaaaagcttatttatctgggtaacccaaactttttctgttttgtttttggaagggtttttgtggtatgtcatttggtattctattctgaaaatgcctttctcctaccaaaatgtgcttaagccactaaagaaatgaagtggcattaattagtaaattattagcatggtcatgtttgaatattctcacatcaagcttttgcattttaattgtgttgtctaagtatacttttaaaaaatcaagtggcactctagatgcttatagtactttaatatttgtagcatacagactaatttttctaaaagggaaagtctgtctagctgcttgtgaaaagttatgtggtattctgtaagccatttttttctttatctgttcaaagacttattttttaagacatgaattacatttaaaattagaatatggttaatattaaataataggcctttttctaggaaggcgaaggtagttaataatttgaatagataacagatgtgcaagaaagtcacatttgttatgtatgtaggagtaaacgttcggtggatcctctgtctttgtaactgaggttagagctagtgtggttttgaggtctcactacactttgaggaaggcagcttttaattcagtgtttccttatgtgtgcgtacattgcaactgcttacatgtaatttatgtaatgcattcagtgcacccttgttacttgggagaggtggtagctaaagaacattctgagtataggtttttctccatttacagatgtctttggtcaaatattgaaagcaaacttgtcatggtcttcttacattaagttgaaactagcttataataactggtttttacttccaatgctatgaagtctctgcagggcttttacagttttcgaagtccttttatcactgtgatcttattctgaggggagaaaaaactatcatagctctgaggcaagacttcgactttatagtgctatcagttccccgatacagggtcagagtaacccatacagtattttggtcaggaagagaaagtggccatttacactgaatgagttgcattctgataatgtcttatctcttatacgtagaataaatttgaaagactatttgatcttaaaaccaaagtaattttagaatgagtgacatattacataggaatttagtgtcaatttcatgtgtttaaaaacatcatgggaaaaatgcttagaggttactattttgactacaaagttgagtttttttctgtagttaccataatttcattgaagcaaatgaatgagtttgagaggtttgtttttatagttgtgttgtattacttgtttaataataatctctaattctgtgatcaggtactttttttgtgggggttttttttttgtttttttttttttgttgttgtttttgggccatttctaagcctaccagatctgctttatgaaatccaggggaccaatgcattttatcactaaaactatttttatataattttaagaatataccaaaagttgtctgatttaaagttgtaatacatgatttctcactttcatgtaaggttatccacttttgctgaagatattttttattgaatcaaagattgagttacaattatacttttcttacctaagtggataaaatgtacttttgatgaatcagggaatttttttaaagttggagtttagttctaaattgactttacgtattactgcagttaattccttttttggctagggatggtttgataaaccacaattggctgatattgaaaatgaaagaaacttaaaaggtgggatggatcatgattactgtcgataactgcagataaatttgattagagtaataattttgtcatttaaaaacacagttgtttatactgcccatcctaggatgctcaccttccaagattcaacgtggctaaaacatcttctggtaaattgtgcgtccatattcattttgtcagtagccaggagaaatggggatgggggaaatacgacttagtgaggcatagacatccctggtccatcctttctgtctccagctgtttcttggaacctgctctcctgcttgctggtccctgacgcagagaccgttgcctcccccacagccgtttgactgaaggctgctctggagacctagagtaaaacggctgatggaagttgtgggacccacttccatttccttcagtcattagaggtggaagggaggggtctccaagtttggagattgagcagatgaggcttgggatgcccctgctttgacttcagccatggatgaggagtgggatggcagcaaggtggctcctgtggcagtggagttgtgccagaaacagtggccagttgtatcgcctataagacagggtaaggtctgaagagctgagcctgtaattctgctgtaataatgatagtgctcaagaagtgccttgagttggtgtacagtgccatggccatcaagaatcccagatttcaggttttattacaaaatgtaagtggtcacttggcgattttgtagtacatgcatgagttaccttttttctctatgtctgagaactgtcagattaaaacaagatggcaaagagatcgttagagtgcacaacaaaatcactatcccattagacacatcatcaaaagcttatttttattcttgcactggaagaatcgtaagtcaactgtttcttgaccatggcagtgttctggctccaaatggtagtgattccaaataatggttctgttaacactttggcagaaaatgccagctcagatattttgagatactaaggattatctttggacatgtactgcagcttcttgtctctgttttggattactggaatacccatgggccctctcaagagtgctggacttctaggacattaagatgattgtcagtacattaaacttttcaatcccattatgcaatcttgtttgtaaatgtaaacttctaaaaatatggttaataacattcaacctgtttattacaacttaaaaggaacttcagtgaatttgtttttattttttaacaagatttgtgaactgaatatcatgaaccatgttttgatacccctttttcacgttgtgccaacggaatagggtgtttgatatttcttcatatgttaaggagatgcttcaaaatgtcaattgctttaaacttaaattacctctcaagagaccaaggtacatttacctcattgtgtatataatgtttaatatttgtcagagcattctccaggtttgcagttttatttctataaagtatgggtattatgttgctcagttactcaaatggtactgtattgtttatatttgtaccccaaataacatcgtctgtactttctgttttctgtattgtatttgtgcaggattctttaggctttatcagtgtaatctctgccttttaagatatgtacagaaaatgtccatataaatttccattgaagtcgaatgatactgagaagcctgtaaagaggagaaaaaaacataagctgtgtttccccataagtttttttaaattgtatattgtatttgtagtaatattccaaaagaatgtaaataggaaatagaagagtgatgcttatgttaagtcctaacactacagtagaagaatggaagcagtgcaaataaattacatttttcccaagtgccagtggcatattttaaaataaagtgtatacgttggaatgagtcatgccatatgtagttgctgtagatggcaactagaacctttgagttacaagagtctttagaagttttctaaccctgcctagtgcaagttacaatattatagcgtgttcggggagtgccctcctgtctgcaggtgtgtctctgtgcctgggggcttttctccacatgcttaggggtgtgggtcttccattggggcatgatggacctgtctacaggtgatctctgttgcctttgggtcagcacatttgttagtctcctgggggtgaaaacttggcttacaagagaactggaaaaatgatgagatgtggtccccaaacccttgattgactctggggaggggctttgtgaataggattgctctcacattaaagatagttacttcaatttgaaggctggatttagggatttttttttttccttataacaaagacatcaccaggatatgaagcttttgttgaaagttggaaaaaaagtgaaattaaagacattcccagacaaa

SEQ ID NO: 36 - DNA, 97505 bp, Homo sapiens
ccctctcctcccctcccctcccctctcttcccctaccctcccgcgcgcccgggccgccggccgggcccgggcctgggggcggggcgggaagacggcggccgggagtgttttcagttccgcctccaatcgcccattcccctcttcccctcccagccccctccatcccatcggaagaggaaggaacaaaaggtcccggaccccccggatctgacggggcgggacctggcgccaccttgcaggtaaagcctgggcgcccgcgggcctccagctagggaagtgtttgcgtgcgtccgcggccggggcgatgggccgtgtcacatggccgctgcgggtgggggctggggtgtggtgagttcgggggctgtgggtgcgccggcccgggcgtgcgggttcggggccggagagccgggaagggacggggctcggttgcactgcgctgccgcccaggctgacgggggcgggggctgcctgcgtcccttcccctcgctgctctcacactccatagtttgtggttctgatttttaaagccgaagggccagagctcttgtttcaggagttgtggggaagccttgttagggacgcgtaatactttgcctccactttttttttttggtctcgtaacctttgttaacagtggtagtctcgggttttccatggcttgtgtgtactcacaaacacgcacacagctgataactctgtgatcatccttcactcacttgtgaaagttgttctgcgggtggagcctattagtttttatcacacgcctttggaaagccctcgaagtgatttctcgtatttcaaacttggtttttaaaattgcaacttactttgttctcttggagggggatattgtctttgggtcaggtacttttgtcttttacttatccttaaaatgtccttttgatcctaaacagaaaaagaatgcctgggttggttttgttattcctttctcttgaccctttaaaagcaaaataccaccagtgtgttgtcaaccatacctttaaaaaagaaatttccaggtaaaacgaatttgcaagcagcattttccatcaaagtcatgtcttgtttgttgcaatttggactatcttaaatttgggtttgtgaaacttttaaaacgacatgtgtaaaataattgttaataaataaataacttggaataattacatctttttagaaatggtctttgaaatgtgatttaatttccaaaattctttttctctcttctgacttcatatgaattgaacctgatagtttcgtatgaatgaatcgctgataggatgttttccttgagcctagtaataaatttgctcttattatgctgaaaatttgctattctactttaacaccctttaaaaagtttccatcttacagagaagttagtcaaatagttaaatggagtttcaacagttttaatacatgaattagtgaagcagatgaagcagagatgggagaagtaatttaaaatgggcttcataaatgtaccatagtttgagggtatttaaaaaatttgccttcggaaaacccatacaagatatttaaagaatttcctctgccagaaggtcatttagcaaacgtttatattaaattcaaaagtaatacttttatttttaaagttccttagccgttgccgtaaacttagctgtcgtagtaaatataaatagttcacatctttcggcatttctaaagagtgtgcccacttttactataaatattaaactctgctggatttaattgagttcaaggctgttcactggccaggtttaattaatgtaatgtgattggaaacgttcattttggggttttagtaagaaattgctcttagagcttggtttttatacttagccacaccttctaaagtgcggccacaagcattgtaggtgttcaacaaaagtttgggttttcaaggttgtaacctacgtttacttagtcataagtggtcatgtctctacacagtctgtaagtttcatgaaataatagtcttttaagaaactgtgcagggtaatttcctgttgtttgtgtcttatcaggcttggtatgtgttttaactcttgtgtaggaatattggggatggttttggtatttcaacagaactttagtaggaacaaaggttgtttctattctacttcaagatggccagaggttgttgtccccttttcattttcacattgtaaatattagaatcatgttgctataatctttacttcacatttgggggaatatatgtcaatggaaaaactcggtttagctgtgtaaaccgctggccaaagacctattgaatttttacattttgcaaatactgtcagttttaaaagtctttccttgttcttgtttggttttgattctgttggttttgtgctttagggctccaaaaacctcgttttgtagcagcttttttatacaggtgtttttgtaatgcatataaaagctgtatttagtgcagtctggcagatggagatttattcatattcttaggacaaagagtcatttttagagggtagaggggggcatgtcttttagattcttagtcttttgatgggtgtagaagagccatttttaggcccttagtttctgtgagaggtaagatgttttcccctaagtattccaaaggtatgtcagaaaatgtgaaacgtaaggaattcacaaccagttaagagaggttatgagagattatgcatttatatattttattttattttattttgagacggagttcactcttgttgcccaggctggagtgcaatggcacgatctcggctcaccgcaacctccgcctcctgggttcaagcgcttctcctgcctcagcctcctgagtagctgggattacaggcatgcgccaccatgcctggctgattttgtatttttagtagagacggggtttcaccatgttggtcaggctggtctcgaactcccgacctcaggtgatccgcccacctcggcctcccaaagtgctgggattacaggcgtgagtcaccgcgcctggccgatgcatttattttcaacaaatacatttattcatttattcaacaaacagctttttctgtgtgtcaggctctggactaggcaataaagtctcttaacagcaaacaagtacacccctgttccttaatggagttagaaaagtggaaactcatgtcccttgccctattctccagtgtttagagtaagacagttgttagtgtacaaatcaagggcacatgcattactgagccattcctaaagtgagcttgccttgcttcctgtaacatgtagcagatagcactagggaagatgtgaagtgttactcagtgtcactgggaacaatctgtgtattttggggggaccttggcaccagttttgcacagtctatacaaactgaagatacggccagtctttcagaaacatgtttattgctgaacagatgtacacttgtagagctaagcttcatctgaccttaatttgatcacttattgccctttaattacagaagctggttaaggaaagaaagcagagttgaataactcagtgaaaggatcgggaatagtgtaaaaagttagttaaaccgagacccaggattggacagcagtctcatgtagtggaaaggccttgggttttggaatcagagagccctagcctaatattttgtttctcagttacaatactgggcaatttactaccaaccccaggcccttggttttctgacacaaaatggaagtactaaccccttcctcttattcagtgatcacaattcaagtacctagaacattgcctgagatataagggtcctcccaaatgatttcttcctctcttgtagttgtgggtttgttacttgggctctttctaatccaaatgatttgcctacactgttattatggacctattgtaaaatgtatttgagaagcagacaatgaacaacaaaggcctgggatagccaaattgtcccagtccatagcttaaagcttaggagagccttggagacccttaataagaatgtgttggcatttatttaaagtgtttctaacaagcaaagttatctggcttctaaacctgcactagattagaaacaagtagattatgggtactgtgggaggcttagagggggtgtggtgggggctggggagtaggatgttagcctagtgtctcttgtcagaaaaaacagataacagctcggtgaggataatagagataatctacaagacacaaaaatagtcaaagcctgactagcatgtctggggccattgagtgcaggaccagacctgaaagcatagtaatgaatgttcatcaattagcctaaatcatgtttgggaaaatctttttaagagtgcaataatctacgtaatatactttagattgtcactcaggatgattaagaaatgttcttaaaggggttgaagattgtgctatagcttatggcttatttcatgaaagatcacagtagctgttatgaccaagatgtttttcatttgttttgccattcagacagccattcagattccaagctgaaagggtagccagcagtaaagaaaggctgtttcagtgtggtagcaccctatgtcacccctttctttggtgtaagtaatttttttgtcagtctgcaggagtatcatataaattttcacttgtgctttgacagtagtgtatgcttttcactgtgttttgagatagagtatgctcgagatttctaggataaagcaagagtggatagttggccagtctctctgttgagggtttcttgactcttgtcatgtgacttctgcccagtattagcactgataatttttttgatcccctttcttgtaaccttacctcagggttacttcttaaaccatctacaccatcagataattattggtgaccttgtaatatgtagccttggctgtttttaagaatcaggtttttttttagcagtagtacaaaagtactagcctttttggtttaaaaatgcatagttagaggcttattgcttgtcattgatcaattttgatcattttttcaggttggtgtaattgtgatgtattcagttaggacataattcaatgttgattctagatttacatctcaaagatagctcgcagcttcagttcagcaatttcatgtagggagaatataatttttccaagccaggtggatttagacactgcctttagtttggtcagatagccagaaatattagggcaattctgtgtcttctgtgcttgcctcacattgtacagtgtgagtggttctccttggctcagtgggttcctcttatttgtaactgaggcacattgataggacaggtgcttgatgtatctttaggtttgtagtcttaagaaaatagaaattctgacgtgattaattcttatcaaagtttgtgaatttactgtgaaattgtcactaattatcctaggtagccctgtcatttttcaaaatctggttttacattggcctcaaggctgtagagtagtggaaagcgaggatagactttagttgcttctgtttagtacacgtgtctaccttaatgtaaaaatttgcatttccttgaataatctacagtgtcataccttccctcattttgtggggaagggggatgtagtttcacatttaatgtattcagtaggaataatcttgggtgaaccactggtattccatctgttcattagtttgagtctcttaagtcaaaaaagactcttgatctgaggaagtagcatagtgaatctgtgatcttatagtttgcctatgtttaaaagtaaactacattttcatatgctgcttcagctacttccagaaattctgtagagacataatggttaaggtcttgtaaatatcaaggaaacgttccatcctcatcacgtctttcatttcagaatgtgaggtggtgaggccggaggcagtggctcacgcctgtaatcccagcactttgggaggctgaggcgggcggatcactttgaggtcaggagtttgagaccagcctggccaacatggtgaaaccttgtctctactaaaaatgcaaaaattagctgggtgtggtggcgggtacctgtagtcccagctgctcaagaggctgaggtaggagacttgcttgaaccggggaggccgaggttgcagttagccgagatcccgcgactgctctccagcctgggagacagagcaagactccgtctcaaaaaaaaaaaagaaaaaaaagaaaatgtggggtggcaaatcttttttgcagagcctcctatataaaatcctcataaatgatgcagtggaagctgggcccgtgagccttctgccttgacttgagtgaactattgaaactcttttgttgactagagatactttatctgtggtagtaaatgtaaattttccttattgagatccacttttaaaattctttttttttttttttttgagacggagttttgctcctgttgcccaggctggagtgcagtggtgcgatcttggctcactgcaacctccgcctcctaggttcaagcagttctcctgcctcagcctcctgagtagctaggattacaggcatgcgccaccatgtccggctaattttgtatttttaatagaaacggggtttcaccatgttggtcaggctggtctcgaactcctgacctcaggtgattcgcccaccttggcctcccaaagtgttgggattacatgcgtgagccactgcgcccggcctaaaattcttaatagacaggtagttaggttgtagttcatgttagctgatcaattaaacttttttttaaaaaatgttttagttatcaggagggtccagctttggcctgaggttgtgcattggccatttctgctcgaaaccagtagtagtcagacttaaaacatgtgcacacctgcacacacagcagcaactagaaagcctttagagagaaatatgcagaatttcgaaatgtaaaacagataaaaggagtaaagctgttttgtggaaggaagaataggcagttgttgaagtcctgcctgatcagttttcctctcatcctcaccaccaggaagcctttgaagcacagctgaagaacagtaggtcttggagaaatttttgctgtagacctgctctatcttaacaggtagctgccagccacatgtggctatttagcacttgaaatgtggctgctgtgactgagaaactgaatgttaaattttacttaatctaaatttagatagccatatgcagctgatggctactgtattagacagcacagatacccaaggacatttacatcattgtataaagttgtgttgggtggcactactctagactttgctttaattgagcttttatggcctgaggaccccactcacgtgaattgacgtggtattagttgctgcttcagaagagggtcaggatagactttgggaatttgaagagcaattagagtacttgtactttatatttgtgctgatttgagtctgggcctgtgtagtgttgtcataggtgctttttttttttttttaataatctgggaatgataaaccaatatgtaagttacgtgtttacaagttgattatagagttgtggattccacaaaactcattataggtgataggaatataactcttagttaaaaaaaaaaaaataagtagtctctttacacagcagtccctatttaatgtggacttttgctaaaataataattttcttgaattaaattcaagcttgcattaggtttgacagtccataaagttgaacacatgaatgttttctgtttgcttttgtttaaaagacatgacccatcattctccatgggggccgacctaggtttccagttggcagtgtctttccttactagcttacgctttggagagaacatagttgtagtgagaattgaaaaatctgtttttaaaaaattgggttttatgtattttaatttttttgaggttttctattatcctggttactaatgaattatttatttgactaaaacagttatacaattccaggtcattgatgctgctgtttttttctctgccttgtagtatgtttgaacatagattgctaaaaatctcggtctccacagaggattggttccgggactctcctgcaagcaccagaatatgagaacgctgaagtcccttgtataaaatggtgtagaatttgttttatgcacattttattgttattctttaaatcctctctagattacttaatatctaatacaatgtaaatagttgttattctatattgttttagaaatgatgagaaaaaagtctgtacatgttcagtacagtcacagttttttcctgaatattttttatccatggttggtttaatccatgtatttggaacccacagataaggaggattgactgcacagtgattttatattatttctagtgggaccttagatgttctagatgaggcagcaccatcatatttaaagtatttttgttgaaataattaactttggttttctttctaaataaaaattcacataggtatttggggaatattttgtattttcctgcagtttgaagatttgaaatttctcttccctccataccttttaaaagtgcaatctacttttgctttctacatttaatcactatctgttcttgacttcaactttgcaaacatattttttaaccattctttttcacatttcccttcctactggccttccggatgaactgtcaagtttagcagtcttttctcagtgatcatactttcttcagtgtttgctgttattgtttatactgtctttatctaaatttcttaaaatgacacagacacaagttaggcccattcttcttactgtaaacagatgaaaatgttggataaaatataaaagttttctcttatgtatacagttgatcttgagagagaaagtgcccaggtactagaaacttagaaaaatcagtcaactttaagggaagtgtggccttgggggatttactagagataagattcagtagttggggctgaggttataatgccattcaatgaaaggagacagaactgtgggaactgtgtgcttaaaaaaattaaaaaatgaaaagtgttctggtatcattgaaacatctggggcttcttggagaaagaagcctcagacctctctatggaggaactggaaaaacagtaggctttagatggactttaatatcacagcaaggcaaggcagggtacatgaaaacatctacagctgcatgtggaatagtgaatttttgtatacataatccatgactgcaatccaaaattcagggatacccagtgaagagtctctttactggtctgttctttgccatacagttgccttttcaaaggcaagtagctttactaggtttttgtgtggtgttccagagattttatgcatctatgaacaattttgtgtgtatattaccttttagtacaagtggtcacatatgtcacttaatagtacatcttattttgtgtcagtatgtaatgaatgcctttcttcttttttggagtagtgggttgtataatattcttttgtatgggtgtctgtaaatttttttttgagacagtgtctcactctgtcacccaggctggagtgcagtggtgtgatcacagctcactgcaaccttgactgccaggggtcaagttaatctcccacctcagctacctgagtagttgggactgcaggcgcatgcctaccatatccagctaatttttaaaattttttgtagaggtggggtttcgccatgttgcctagatttgtcttgaactcctgggctcaagcgatttgcctgccacggcccctcaaagttttgggattacaggcgtaagccactgtgcctggccgggtgtctgaatatatcatcagtcctctgttgaatgtttccagtcttgtggtattaaaaacaatgctacaacaaataacttcgtttatatagcattttgctcctttgcaggtatgtctgtaagatagatttctaggagtagttcaaagaatatctacatttgtaatttattttagagaatgtactttattcattttttcgaataacacatgcacatggtataaaagtcaaggagaacaaaatagcaaatactgaaaaaagtaagcctcctttacatctcctacctcctgctgcccagttgtgctttccagaaatgtaaccactgttactagcttttcgtttatccttctagagttgctctgtccagtatgatagccactagccaccatgtggctattgagctcttgaaattgagatggaccacaagcataaaatacacaccaattttctaacagtacaaaaacagaatgttaaatatttcaatggtttttaatacggattgcgaattgaaatagtattttggatatattgggttagattaataaaattattaaattatgatttcatcttgtaattcccgctgtgatggcatcaggaaatgggatctttgggagatattgaggtcaggagggtagagccctcatgaatgggattagtgcctttataaaagagaccgttgttagcattctgtcctccatgtgtagatacctgaaaaaagcggcagtctgcaacccagaagagggccttacttggaacctaaccatgctggtaccctgatctcggacttgcagcctccggaactgtgagaaataaatttctgttgtttataagccacctagtctgtagtactttgttataccgtcctgaactgactaaagcacaccaatttttacttttttaatgtggctgatagaaaatttaacaatatgtggtttgcatcctgtttctgttggatagcactggtctaaagaaatccatacatatataaacatgtactaacataagaattccacttaggcaaaatttttttcttttgcgttgtaatctttggaatcagaaatctgctgagatattggtaaagagtggtacaaagctgttctttatggccccatcagtcacccccatccatttatcatttggctctaatcagtgaaggttatgcttccattgacttctacagtgttcactttggagagaaggctgccgttgttttggcttcgtcttttttagcttgctccgatttgcactggttgcctctacacctagtacgccgcagtcattctgagatttccccctcactagcatattagggattgccttcattttttcttctttgttagatctcctattctttgtgtgtgtgtgtgtgtgtgtgtgtgtgtgtgtgtgtgtgtgtgtgtgtgtatttttttttttgagacaaggtcacactctgttgtctagttggagtgtagtagggtgatcatggctcactgcagccttgcactcctgggttcgagtgtagatcgtattcctttttgttttactagtatctccttttgatgagacatattcttcaggaccttcctggagagtgtgttgggggtggggcggtaaatacttggagatgttgcatgtctgaaaatgcctttgttctggctaacataagtctaggttggaaatttttttttgaaaaattatgaagcccagaattacgaagccattgctctcttgactttgtttacagtatactgttgacaaaaccaaagccattttgattgttttctatataacctattttttttcctccttggaaactttaagccctttctttgtctttggcattctggttttgctaccatgggccttcatgtaggtttgttttcatctgttttactggggtcttgatgggccctttccatctagaaactcccatctttcagttcaggggctttttcttaatttatctatttgactcccctactctgcatctctgtttggaactgttgttgggacattggacctctggaaccagtcttccaatttttttcattttctctactgtttcccatctttcttttctactttctggaagatttcttctactttatcttctagcacttctattgatttttttcccccgtttctgctgtcaagctatgcaagagctgttaagttctctgaatgctgcctttgagagcatgctgctctttcttcagggttgctcagtcttatttctctggccatgttgatgttttaaaaatgttttctttctctgtatagtcttttcctgaagctgaatttttctggttttgtttgacgtttttcctcagataaagtaattcttaagaagtggggatctaaaaagctgatcaaaaactcaacatgtgggtgaaacttgtctcctttcagtttcactggagagggatctgagcaggcaggctgtttgttggtaaactcccaatattagcatctatatgcctttcctcctgggtcggtcaggtaccctagtgaagtcttttgatctgaataactgggcggaggtctggctgctagtatttgggagccaaaacccagtggaggaaggggtttgggagtcgacatttaacacagcgtgctcatgttcattcacaccctcttttcttcctacttatacccaggccatctcctagtccagggattttgttttcccctttgcagaaagtaaacgttgaggcagaggattagttatccagagacagtaggggcggaaatctaagaactgaattcctttctacaaagctcttaacaagtgctacctattattccttcccctgcctggccctcagttcctgccgtgacttgctgttggttccttaactttttgaggtttctgtgttaatcaatggttttcagcttttcctacagctagcctagagttagtagtttctgatctgttcaattactgctcacccattttccagccattaaaattttgcttctgttttctccttacctcttctccctatcctcatgaggtttctggtttttaaaaattcccttggttaggcgtggtggctcatgcctgtaatcctagcactttgggaggctgaggcaggaggattggttgagtccaggagttcaagcctagacaacatagggagaacccatatcttaaaaaaaaaattctttatggttttcaataggctgttttcatctacaatgcaatgatgagttaaagttttccattaaaaatttttttaccaataactctccaaaagaattgaaatagaataacgtataactccaagtcagtggggatgaggggtggaaataaagagaaattgatcactccagtataaggcagggaagaagaaaaaagaaaagaaaaatgcataggtattagaaaacacaaaataagatggtagaaaataagctgaaatatctccataaacccaatatgtaatctcagattaaacttgctggctaaaggagaacaaaaatttaaaaaatccaaccaactgtattttacaagtggagatactcctaaaagtatgatgacatagtttaaaagcaaaggaatggaaaagatatactaggtgtaatttataaggtaaaattggaagaattacaggtataaatcaaatctataatcgtagtagaaaattttaatatacctctcagtaatttatgaaagggtagatttaaaaaactacaaggttatgaaggattggaagagtacaattagcaagcacccaacaattacagaagatacattctgtaaggggaatcgcttgaacccaggaggcagaggttgcagtgagccgagatcataccactgcactccaggctgggcgacagagcgagactccgtctcaacaacgacaacaaaaatagtgtcagcgagactctgtctcaacaacgacaacaacaaaaatagtgtctttgatttagtgcatgtaactaagttgaaaagagtgccaagactgatagaggagaaaaagaatgtacaaatgtattggaaatgaagggatggtataactgcagacaaactgagattttaaaactgcaagaatactgtgaacagttttatttctttaaatttggaaacaggtaaagtggacaatttctagcaaaacaaattaccaagttggcttaataagaattagaaacttcactagattatgatttaaaaacttagtcatgtttagaaatatacctataccaggcggggcatggtggctaccactttgggaggccaaggtgggcgatcacttgaagtcagcagtttgagaccagcctggccaacatggtgaagccctatctctatcaaaaatacaaaaattagccaagcatggttgcagtcgcctgtaatcccagctaatcaggtggctgaggcagagcccaggagacagaggttgcagtgagacaagatcgtgccactgcactccagcctgggcgacagagtgagactctgtctcaaaacaaaacaaaacaaaacaaaataaataaataaatatacctgtaccaatgtaaaattttaagtcctcaagcaaaacaccagactacaaatgaagaccccgtatgggcaagtgcaaccaaacgtgagggattaactctaatcttatacaaaatgttacagaaaaattattttgcaaggctactataatcttgataccccaaccagatagtgtgagaaggggatataggctgcattctcaccaaagaacatggcaataaaaattgtagtttgtaaaatgttagtatttactcaaaacaaaaataccatgactaattagggtttgtctcaggaatgtagggatgattaagcattagaaaactcgtaaatgaaattcatcatgttaacacattaaaggagaaaggccatatgataattttgatggacaacgggaaagcatatgataacatttagtacttgttcatgacaaaaattcttaggaaatgaatacaagagaactttcaaaagggtgttaaaaaacacagaagagtacatacggtataattccatctatatgaatttctggaacaggtaaaattaatagtaatagaagtcagtagttgcctgacgggggaaggtggattgactgaaaaggaacgtaagggagacatctgaggtgctggaaatgttgtttttttggggattgtggttacattagtgtaaacatttgttagaattattgatttcatgcccactcacggttcgcgaccctcagtttagagaaattgtagagtgcagcatatggtgaaatgtcttttttagcaaagtgtgtgtgtatatactaggttgcatgtaaaatgtacttttcactgtgggactttttttggttaaaaagtttgaaagtttgaaattttctgccctagaagagcttttacatggtataaaatgatatataccagcctattcatagcaggttgtgagagaggaaaattggaaacctaactagtcatccagagtgaatggacagtgaactgtgctagtcataaaatggaatgccatgtgacagctaaaatgaatgaactaggatttaggattatgtatgtatcagcatggactgaacagtatcacactttcatataaatttataaaatgtacagaactgtattgtatggatacaatatgtagcaaaactgttaaatgaccatgggggaacatcaggatagtgataatctctgagaagcaagagggagggaaatgttatcaaagaggaatacatagggggctttagctgtattcgtatcttatttcttatgtctgatcaagtactgcaaaatgctaagatatgacagctagatggaaagtacatgagtgttgagtgtaatatttttgtgtaattaaagtccccatttacaataaaaaccaagatacctggagaaataagtaaatttgacaagatgtaagattttttatggagaaaatatgcaacttatcaatagataataaataaatggaaatactcatttgcatagtcggagtacttgatatcataaatatgttctccataaactaatataaattcattgcacttccaatcaaaatcctataggatttttgtagaacatgctaaacttaaagtaaccagcaatactacacatctgaaaaataaggaaggggggtcaccctgacaaatatcaagactaactagaaagcagtagtaattaatattttcttacattgatgttaagtgtgaacaaataacagaatgcgtgtgatcagacctttagtaggaatttgttatgcgacagaagtggcattatgacttagcaaaaggtaagctttaatacacaggctgtccttatgagagatggttagatcactgtctcacctcttaaaaccaaatttctgatctttcttttagaaacttaatatgaaaagtaaactaaagcatccataagaatatctagaggggattctctgtattacgtcagggtatttatttgtgcctcacattcttcatttgtaaataatagtacctaaccccagttggttcttaggattcggaattcttgcttactggactcttaggcttaagcactcaataaatgtttcctactatatttagaggcacagcaagatttctttgaaaagcaaggttgtggcataaaagatttttaattaaaatacagctttgtgtgttccaaaagacaacataaaatgaaaagtcattctaaggatttggagatttttttgtaatacatactcagtgatagggtttatgtcagaataaaaacagtaagaaaaggaccacatagttgaggactctggaaagagtatgcactgttgtttaattaaatgtgcagagaatgctatttgtcaaactataatatagagttaataacttgaaggctttactacaagttcaggataattagacctcttaccttattgaaactttccggtgagtaatcgtagaatcctaattttactaaggtatcatttggtaagctgacttattcagctgtaaagatagtctttgtgttcttttgaaatctgcattatgtaagtatcacttattgctggaattagaaatagtgtctgaacttagatttcaattcttgcagatgttgaaaatttatttcagtagagaacttgctgccacaccattgaaggaaatctgtatattctgtaaatgactcattcacgttttgatagcaacttgattataaatctagttttcttttttgtatttcatttgtttttaacctggaacacattgttatctgttccttgtcagcctacattcagtctatttacacttcaaaaatattggctaaaaatgcttcagtttttaaaataaaagcttaactaattgaagatgtattatcagcattacttacaacaaatgttattttattacataatttaaaaattctccggagatattagacagatgtcagccaaccatggttactgagacatgcaaaggtaaggctggcaactttaagtgttcacttagttccaaaatggttttaactcctcttgtaagacatgggacactgaaatcatgtggcaataccaggtcatgtggccattcagatgacccagaataggcctaaacttaagttagtttcatttcagtgaagaaacaatattgtaaaggttttatagaaaacttttagatccccaggaatacagcttaactcataagaaacatttctcctaacgaaagtgtaacaggctgggcgctgtggctcatgcctgtaatccctgtgctttgggaggccgaggcggatggatcatctgaggtcaggagtttgagaccagcctggccaatatggtgaaaccccatctctactaaaaacacaaaaaattagccgagcgtgttgacgcgtgcctgtaatcccagctactccggaggctgaggcaggagaactgcttgaacctgggaggtggaggttgcagtgagctgaggtcacgccattgcactccaacctgggcaacaagagtgaaactcctcaaaaaaaaaaagtgttacagaaactgtttactctcattcctcctaatgctggaaatcccttttttttttttttttttttttgctgtttatacagaagtttcattttttattctttttttaggctaaattcttatgaatggaataattgaaccaaagatacagatacttgtagggagattcttttattttgctttttctatcagtttttcacaaggaacagagagattactcatgctaactcaaaaagaggttttgttctgaggatataattgtggagctggaacaggcctggacagtcctcagaaaccaagcctagagattggctgctctgcttttcttcaagacaccagttgtctctgcctagctctggcacacactcttacttgtacactgactgctagctcccctgagtctactatattttatgctgcctcctggccatgtgatgaacatagttacttacataaaggcatgtataaaactgaccctttagccttcagggttgcttctctttcctcattcctaatagtgatgaatgtaccattacatgccactcagttacattaggtagtcggtcacattagttgtgtttcaatccttttccctaaactgcacgtccagtaggtcattcaaaatgcaaattgtcactggaataaatgaagtaatactcctatcattagcagtaatttctgtcttcagctctttaatctgcactggccttattttcccctcatcttctgccacagtgcttcctgtgcaccgtattttagtgataacctaaatttttcgtctctcctaaaacgtttcctgtctttagaaaacatgctgaactttctgcctgctgtactatctctctcaatacttgtgctctggtgtcaactttagtgtcacctttcccttccaaaggttgaatcctgttctctgtgctaggataagactgtgtcacatgatactacggtgtctgtagttggctcctctagagcatactttgtggcacagagtaggaatccaacaggggccaaaggtagccaagtacactttttgctgcctgatagtcccaggttattagttggtagatgattacatgcgtttgatggagttttgtgtatttgctttattttatcaagttacatactacagtgcttatttatgtgtcgtattataggtctaccactatagacagtttaaccgggctgttaagttcactgttgctcttttatttgcattacagttccctaattctatgcaaacctcactttcccaccatttctactatattgctaaagaaagttacataatcctattattgactcctttcaaatttttagtgtttgaaccctagttggactcccaaggttgccaatgcagtattgttatgtggcattccatacatccctaaaaagggttgacatggccaaatttatgaaatttatgaaatttggcatgctgtgttgcctcttcctggagggaggccttggggccagtctcctgaattgagcttgaggatgcattgattttttttctgtttcgaggggcgtgagtatgattatattaggttatggccattattttctttttttttttttttccagatggagtctcgctctgttgcccagactagagtgcagtggcgtggttttggctcactgcaacctctgcctcccaggttcaagcgattctcctgcctcagcctcacgagtagttgggactacaggcactcgccaccacgcccagctaatttttgtatttttagtagacatggggtttcaccatgttggtcaggctagttctcgaatgcctgacctcgtgatccaaccgcctctgcctctcaaagtgctgggattacaggcgtgagccaccacgcctggcagttatggccattattttctagcaaattataccaagggctgaatatcctcagtttgaggaccttttttgagaacattcttttgataatttaaagtccttttttgagcttttatttaatgtttcttttttagtaaatatacagttgacccttgaacaatggggtggttggggtgctgtcctgcacagtgaagaatctgtgtataacttttgactctcctaaaacttacgacctactgttgactggaagccttaccaatacataaacagttgattaacccatattttgcatgtcacatgcatgataaactgtattctttaagctagagaaaagaaacctactaagaaaatcataaggaagagaaaatacatatactattcactaagtggaagtggatcatcatgaaggtcttcatcctcattgtcttcactctgagtaggctgaggagtggttggtcatgctgtctcacaggtagaagaggcagactgggagtcaggcacattcagtgtaactttatgaaaataagcaatttttgcctgactttttgcattttcatttctccaaaaatgtttctgtgtggtaccagtcctccttacaccttttgctttagtttcagtgcccatgtaatggaaggatctgtgttataaaagaagtcaaaagcagccttcaataattagaaccctatattatatatagctagattgtcctatgtcaatttgttttctggcactgcttcttctgcatcttcttcctcatcatctggagctagtttagaagcactgatctctgttacgtcgtcttctgttaattcctctgatgtgtggagtctgttagcccttgaatttctctaaaaagatccatctcttgaagcccttcactccccacttttttttttttttttccatatccacaatctcttatgatttcctcgataggctctggtgtaaatgctgtgaagtcgggcacatctggatactgttttctctagtaggaatgtatcattttggacttgatggctttcatggttttttctataacagcaatggcatcttccatggcgtaatccttccatactttgatgacactctatcagagttcttttttgtaacattgacggtcttttccatggagtactgtgtgtaatgagccttaaaggtccttatgactccctgatttagagatgttattaatgtgttcagggacaagtagatcactttgacatatttggtgttggaatcatgggattgtgggttaccagcgacattgtccaatgtcaaaagaactttaaaaggcagtcttttactggcagggtacttgacttcagggacaaagcattgatggaacgaatccagagaaaagcgttctggttgccctggcctttttgttgtggcagccggtgtttatcttttcccttcaaggattggaggtcagcagctttatagagaagggcagtgctgatcataaacctggacatatttgcacaaaacagtagagttagcctgtcctttcctacctcagatctggtgcttgtttctctttttgctaataaatgtcctttgtggcagttttttcccctagaatacagcacttgcgcctgcattaaaaacccgttcaggcagataccctttctcctcagtgattttcttaatggtgcctaggaactaactcatctactttggttgacagaagctcctttcctgttatcttgacattttttaagccagcctgtttctaaattctcaaccatcttttgatttcattaaattttccagctttagatccttcaccttaattttgctttaagttgtcatataatgactccgctttttctcaaaccatgtaatagtctataggtacgcctttctttatagcaatcctgtacctacataaaacctgcattttcaatatgagatcaaaagttgtttcacaaaaggtgcaagatcttcacacctgttggcctagctgcagtggcagcttcacaaattttcttttttttttttttttagctgtagttcttacactggattcatttatcttgaaatggtgggcaactgcagctgcagacctcagtctgtggtacataccaagcaattggagtttttcttgtaatgtcatgatttttctctgcttcttgggagcactgtcagcatcactagtggcacatcgtatggatctcatggtattagtcaaggcttatggtattgcactacacatggtgaaaattacatgagaaatgtgagagatcactttttactgtgataatttactggagagaagaactgctcatgcagagatgattagcctcacacagtggatactcgcaacacttccgctcaccgtgatagcaacaggaggtggcgatgaaattattacagtagtacagtatgtactaccgttaattttatgtagttaatgatttaatacttcatctgaatgtttacatttctcaactgtaaatggctccatgtatggtctgtgtttgtgtaagttttgataaattttaactttttatagtagatttttgtatttcatgatggtaaatgatagagtagtatctacatatcttttatgctttataacatacctttttcttagtttttttcagtgtttctaggctacctggtttatgagtttttttcagattgtctcaaatctccaagacattttgcaatgtttcttgaataaaatctgtgtataaatggacctatacagtttaaacccatgttgtccacgggtcaattatatagctctgttacaacaaccattttgtcagtgcctcatgtatgtttgtgatggctgtcatttgggctctcaatttttgtcctcaaaacaataccccttccaccctccatccacgaacatttgcctacatgtacttgcagaggctatctgcatgttgtggacggaaacttccaagcttacatctttggtcacttgcaacctcctcccttctgaaatttgtaatgtgcattggcatgttgaagcttttgagaagttcttcagtaaagaagtctatttaacttaatttaggaacttcttaatgtgtttgtccaggcaccttttaaatttttttgaattgtaatttacattgctaaaatgcacagacttcaaatgttcagttctgtgagtgtttttgagatagagtctcactctctcgcccagggtgctggagtgcagtggcacgatctcggctcactgcagcctctgcctcctgggctctagtgatcctttcaagtagctaggagtatagacatgcacatggctaacttttttctgtattttttgtagagacagggtttcgccatgttgctcatactggtcttgaactccagaaatcaagcaatctgtctgcctcagcctcccaaagtgctgggattataggtgtgagccactgggctcggccagttctgtgagttttggtaacttgtactcatgtgtgattacctctcaagatagaaaacattcaggaattcaacagtggatttacaggagcgagggaataaaacaaagatagagaacacttttgtcaccgtagaaaggtactttgtgcttctgtccaaacatttccacttctcttccttagtgcctctgagatggtcatcttgacttgtcattagattagttttgcctgttgtgggaagccatgaatgaaatcagtctatatttctttgtcttttgcccagcatgtttttgagactgatccgtgttgtggagtgtataagctcattcatatttgttcctgagcagtattcctttttatgagcacactataattatttgttttcttttgatattttggctgtttttagtttttggcgattattaacatggctactatgaacattcttatacaggtttctttttgtggacatacgtatttatttttcctgaatgtgtgatacagggtagatctatgtttaactttttggaacttgccggttttccaattgtgctatataccattttatactttcatttcagcagtttatgaatgttctagttgcttgatgtggtagactgaatcatggtctccaaagatattcaggttctaatcccaagaacctgtgaatgttgttttatatggcaagagagactttacagatgtgattaaattaaggatcttgagatggagagatgatcctggattatctgggtgggctttaaatgtaatgccaagagctcttactagaaggccatagagggagatttgaatacagaagagaaggcagtgtgacgatggaagcagagattggaatgatgtgctctgaaggtgggggagagagcacaagctaagggaagggagcacaagctaaagactacaggtaaccactagaagctgaaaaaggcaaggacgaacttcccctcagacactccaggaggaatcagtcctgccaacactgtgactgtagttcattgaaactgattttgctaaatttgtgctgtgattgcgattatttgttacagcagcagtagtatactaatacactccacatcttcatcaacatttagtagtgtcagaaaaattttaaaccattctagatggtgtgaaatggtattgcattatggttttagtttgcgttttcctgatgattggtgatactaaatacctcttcatgtgctcctgtgtcttttatgacatgtctattattcttttcctgtttaacaaaaaagctgagcttacctttttgtgtgatttttaaattttgttggtttatgttacatacacagatttgagtatcccttatccaaaatgcttgggacccgaagtggttcagattttttccaatttttagaatatttgcattatagctgtatagtacaatgaccgtttttttgggggtgtcatgttggtactcaagaagtttcagattttggagcattttagatttcagttttcggatttgtgatgctcagcctgtattttttttttctttttctatttctttttttttctttttgagacatggtcttgttctgccactcagcctggagtgcaatggagtgatcttggctcactgcagcctccgcacccctgtgctcaaatgatcctcccacctcagcctcctaactgggagcacaggaggcaccacgcccagctattttttttgtattttttgttttttagtagagatggggtcttgccatgctgtccaggctggtcttgaacactagagctcaagcagtcctcctattttggcctcccaaagtgctgggattacaggtgtgagccaccatgcgtggctcaactgtatttctcttgtggttaatgctttttatgttttaaggtcatgaatgtattctgtgttttcctctaagagcttaagattctgctttcccattgaagatggtatgcacttgtggttgaggcttgttattttccatgttgttgaaaagttgttgaaaactagattgaccttgggccttactggaaaatgagttgactgtatatgtgtgggtctatttctagacttgttctgttccactgatctttttttcttatgcctactctatactcttgattactaagtctttttagtaagccttgaaataaggtggtgtaaggcctccagttttctttttcaagaatggtttggttattctagtttttttttttgtttccatatgaattttatatcatatgaattgcttaactctgctggaagtttggtagggattacattgaatccatatatcaaattggaaagaatggacatttaagcaatatgaatcttcaagtctatgaacatgatctctctttgttcagtgtttttcatttttcttagcaatattttgtaattcttagtgttgagatcttgagtatctttctttagatatgtagaaaatatctgttgtttcaagcgtatttcttgaaatttcattttccaaatcttgaccctttatcttgaaaccttgctaaatttacttactagttccagtaagtagattacttgtagattccatgcacttttccatggagacagtcatatcactgtagaatataaagtcagttttatttatttctttccagtctatcttttctttgttgcatagttgtcctgtctacaatatccaatgcattactgaatagaaagggtaaccgtggacatctttgtcttattcccagttgtaagggagagatttaatgtttctttatgacatatgctagctctaggtttttcatagatgtccttttcagattgaagaacattcttttctagtgttgctgggagttttaaattatagatgagtgttgaattaacattttcagataccttttttctcgctcatttgagagaatcataggtgcgttttctcctttgtactataaatgaggtgcttgatttttgaatgttaaaccaattttgctccttgggataaatcctacttagtgatgatgaccttttctattatgttgctggatgtgatttgctaatattttgtttaggatttttgcatctagtagtaacagacctttgctgtgtattagtacgggatcttgggcccaagccggcttgttgtccctttttcagtatcagacagctgttgcttctcattcctcagcatctgtgtgcctttgtctgggactggtggtagcaatgtttcctcccttcccgtggcagtagaatatggtggttattgttacagagtgaaaggcatgtttgtgtgtgggagatgggcaagtaagttttgctccacaaatcccccaactcagcagcacatgtcttttgctctacccttccctttgaggcaggggatctttgcttgcccttgggtttggtagactttcctgcctctcccgtcatagttgaaggcatttgcttcatacgagatgccaccaaatgggaggaaggagctctcttccgttttctgccttttttcaagagcactcagttgaggcccttggaaaagagcttgtgaatgagtgcagattctctttctatcgaggactcccagggattttaactgttatcctagctcggcctttcatccttacttttatctttaatattcagcaggttgaccatgaatgtgttttctttccatatgtggattaatatctgtcatctcttgaaaagtttatggccattatctcttcatacatttttttgttccccattgtctttcatctttctctggcaccccaattaaacccaactgacatttggttttggatattctgagtcccccccccccccacactgttttttccctctttgtgtttcaatttgcatactttaatttggcctgtcttcaagttcactgctcatttctgttaagcccatctaatggtatccttaatttctaatactatagttttcatttctaacgttttcctgtgatcctcttttgtaactttgatatctgtgatgaagttttttcattattcatgttgctatctcttccatcagtttctttagcatttttattatagttatctgattttattcatgttttgactgtttgctactccctgtatcttgtaatttttgattgaatgctgaacatttgtataaaaacaatggagattgaagtaaataatatttacttttagaaaatggtccatcatttcttgttttgtccaagtgtgattttggatctctttttggtttatagctgagccgtcagctttctgaaccatgagaaatttctctatagctcagctgtcaattccttggtcattcttattttctttccccccaccccctctttctctagtcctgcctccaagcttttgtgcccagtgagacatctttctgctattaataccttccagaggtttcttttagcaatcctaccctgtcttcaagttcgctactcatttcagcctcggtagatcaatgtcctgagtatctgggtgaaagttttctcatctttcctgtcctaccgcagcccttggcagctcaatgtctagactctcttgggatcatctttttctcacctttcttgcctgtccctccccccatcccccattgatgagggtagattttttgcatttatgggagatcttaagctccttaggggatctccctcagctttccagtcctgttccccaagctttgacatactttttgcaagtacttagtggaaacctatggggatgagtggttggggtggatgcacacttgctctgtgggatccttgcaatttaatatgtcatgtcggtgtgcatgtaggctggtttcttctttctttcatttatggcaggattattcctcactagccgctccaccaggaaagagaccatccatgcagcctctcttctctcaaggctcaacacttggaatttagttcttcttaggctgctttgtatcctcaactctggttcagagagaccatgattttgtagcttatctggctagttttgattattagaatgaaagtgatgctctgttgtaactttctacgtcctaatcagaagtggaattccttctatggaatactttttaagtatatagtctgataatacataactgacacgttttctgttgtttcataatggttgattttctcagggctacgtttctctattttttcctgttctcaaatcttaactctccatctctgtcctcaagtggtaagtgatcttgtgtcttattttgaaattaaagtcatcaacaaattatttcaactcatagatttatagttgtggaagacttactattcaaatggaattagaacgttttgggggataggatgcagtagttcttggtagtccaagactcttaataaaacaactagaaaagccaggtaatttacaaaatttatatatttagcgatagagaacaatgggtgtaaaaatgattaaagaaagcaaaattttgcaccctgggggaatacctttcacaagtgagctgagaggtctgcagctgatcattgtttttcctgggtacagagtagaggaggcctttgggctgcagcctgagtggcagattggaaatatgaggggcctttaaacacagagaacgccctcagtatattcctaaattctgtagttcagctgggcggaagagataaaccaaaatctcagaaaaggagattgggatattttctagtcctatggtgttgagataaagattctctaggggaagcgacttgagaacaataggtgagagttgaaagcgtttgaggaagtggtgaatacacactgatgattttcaacacacccagtttcttcccccgtagacatttgccaaattctgaagctgcttaggctagagagctaaaccagaagtctcttaaaaacaaagcaattcttatagtatctaggtacctagaagataacgatctgctagcttttgaaatgaaggctctgcagagtctcatcctaggaacagggacaaaccagaggtagtctccttcatagcaaaactgctactcagcagtgttctatgattctggcattatagaggaagtagtaaaagtatatgtatgaaaattgtgttaagtgaaggatgaataagaaaatatctagggtaaccactaaaagaaaagaatgtaacaaatgaatacagaaaaaaattggatatagaatatgtgataaattcagaagaagacaagaaagaaaatataaaacaagcaggcaactaaattagtaattatgttacatggaaatgggctaaatatttcaagtaaatggcaaaaatcatcagactggacaaataataattacctaaatataagtacctagaaagattgagagaaaatgatgcgaaaaggtataccatccaaatgctaactgaaggaaataagtgtggctataccaatcaggcaaaggagactttaatacaataaacagtagtagaaaaagagaactacattttatagtgtaaggggattgatccaccagagttaccacaatcctttatgtgtacccagtaaaatagcccaaacatctataaaccaaaaattttattttgaactaaaagaaacagacaaatatgccatcacaatggatgcacatatataggacatacatacatcacaattagcaggcttgatctaattgtcatatgtagaacattgaaactattaatggtggtattaaccatcttttcccttgcacatggaaattgtactagaattgaccataagctagggccatgaacaaagcctcagcaaatatcattgattttaataattgaatatgttgtttgtattatagtaaataaaaataactagaaaattcctagctgcctagaaataaaacactatgcttttgaataacatatgacttaaaataagaatttatgatggctattagaaaatattttaaactgattgaaaatgaaggtgaactacaatgatctagattgctgctgctgaaatgctaagatgaaatttatagccttaagtctatgcattggaaaagaaagcttttttaaggaggtagaaaaggaataggaaatcaaacctaaagacagtagaagtaaagaaataatgaagacaagagcagaaattagtgaatagaaagtaatcttacatagagaaaattgacaaagctaagaaaaagttggttctttgaaaagattaatgtaattgaccacttagcaaaactgataaaaggaggatggggagggggagagagaacataaatttaaataataggaattgaaaaatgtcacatcactacggatcctacagccgttaaatagaggcatttatgaacagtttatggagaatatgggataggcagagtaggcagaaattttgagtagttagggctggatcattcaatatgggtaggcagcacctttgtgtagctattgagtacttgaaatgtggctagtcctagttgagttgtcctgtaagtgtaaagtactcaacagattttgtagacttagtatgaaaattttttttatattgattgcaggttgaaatgatggcattttggatatattgggttaaatacatcattaaaatgttgcctattttctttccctttttaaaatgtcattagagaacttaaagtacatatgtagctcatattacatttttatagaggttgttatattggctttaagataggtactgttatccttattttacagctgagaaaactggggtgtatagaggttgccatgcagctagtaagtggcatccttgggatttgaacctggccaattggcttcagaatctgttctctgaagcattacactgtttatgggttcttaaaggatattaagtcattttactgttactttttgcaaatattgaaggatttttagtagtagggtgacatgcagtatgcattttagaaagctgtttgcatcaaagaaggtagaaggtggtgactgaaagactagttaaatgatttgtagattgagaaaggagttggagctaaatgtgtcattctaatcctatctaatggactaatttgtcaggcacagatagctctgttgattgtataaagagctcagcctttaatggctctttttaggtctccagattagcttcagattgttatgtgcaacacaatgcattgacacaattaagtacttgttctctggcatcatgctgcttgatataaatcctagtgttggcacttaaaagttgtgttaccatgttgtgttgctataaattgtcctttgtattcatgacacctttctccctaatcatccactttttttccacatttgataactcctttatatgtatttcttagaatttttttttcactgaacttggcgctttctgagctctcccatataccagcattgcgtttcattaccacatgacagtttgatctctctgctaagctccaaacctttgtttctagctgcttatcgggcacctccttctggaatttcatagtcacagcaaatttagtttgactaacacaacacttatgttccccaaatacttcgtattttggcgaattgtattttcattcaactggtttttcaagcaagaacctgtaatttgtaactttttcttaatcaactctgttccttctatgtccctaatagctattcttccttttgtgtattgcaattctctgctggttgatctctctgcccttaaaaacttaccccttctccattccccactgccaataccttgctacaaaggatttcttttgtcctacccgtcccagctcaacagtgtagtttgcagatgaataacacagactggatttgagaataaacaggtaaatacaggcacaatagacaggcaaaaaaaaaaaattgttgaatgcaaaaaggaatgaataaatggcaagctgccaaggaagtgcaaatatttcctcaggaaaatctttcctgacgcctaaagcaaaatcagatggtgtttctttgtgtacctgtaatcccccttgcaatttctcttaattgtcatgtgtattttaatcatggcagtcttcttcactagtcattgaccatcctgagaagagggaatatttaaaaaaaaaaattattcttccatgtggtgcaaaccaaaataatggaattatggagaggttagagcaggaatgcagtttgtgtacattggaaatgaatcttagcatataatctatgaaaattagccatgttctttgatgggaaataaatttgcatcttgtgttaggatcttctttaacgttaagaatatgtgcaaagtgtgcttaaaaactgtttttttcctttaaaaatgttttatccagttttttgtacacacatacacaaaaacatacacaatggccatatcattcagcctttttcatcttttcacccccttttctgcatattggtatatctgcaacccatattaatatcctagatttttgtttatacacgtataatccagttactagttgtaacacgtggcacattgccagattacttagaataaagctgtcacatttgaccttttcaccagcaatgtggaatgataacaatttcttcacatcttctccagcagtaggtattttaattaattcaatttttgccagctagattgggcatgaaatgatgccttattattattttaacttgtacttcctcctctacgtttaaaaactattgtctgatcattatgataattaaggaacaaactaatgaaaatgtaagcatcattgttttcttaaagatacactttgaaaactacaatttcagtatttggggtgtgtgatgtaaagactacagacctctttactttctaaaaaggatgccttttgggaactttattaaatatggcaaattgaacacattcattttcctttttcctatatctcactaaaattgaaggcaaaggaaagaaaagcgtaagagctaagatattaagagcttctggagcgaaacaatttttaaaccccaattaaaggatcaggaataaaagttatgtgggacttaccagtatcagtagtggagtctagaaaattgaggggacagtgctttctaaattctgtgtgaactgataaggaatgacctacagggaattaagcaaaaaaataaaaataaaaaaataatttcaagatatacaaaataaggaatattatgctacttttgtacagcaataaggtgggaatgtggttagttgtatgtatacatgtttatatttgtaaaatgacgctgaatagacaaaacagcttaataaaaatgattcctatggaagagaaaagacaaggtacaattccttaaattgggaagagaaactatctgactttactcactatgcaaattgttatttagatgaaaatgaaaaaaacatgtgttaaaaaatttctctcaagagcaggtgaaaccggactacagcttttctccacggactctgtttgccatgtttatttctttattcttgattacttcacactttacgcattttcccttcttgtaactgtagattttgcctcctattagttatgaaagtttaaaacccgggggagagtgggcttacaaattttcaatgtatttttgtatagtcttttgagattagagtgaagttctaaaaagtaagagaaccttttgtgaaaatattttaattgacactactaagagtttaaaatagtattggtggtgaaaaatcgttaaaagtatctgattttacttgcaaaattactgtattttcccacaagaggagtccttacaacattcttgtttttagaagggtttgtttccatcattcatttaaattcataaagataacgttttcatgggtggagaagtctattgggaaagtcataattcgaatttctatcttgctttgcagtttgctttctatgataagttgaaattattacttgatgttcaaggtagtctctacatcatcctttcaatatttctgctaggttcgatacaagaggctgttttcctagcgtggcttgctgcctttggtaagaacatgtcgtccatcttgccattcacgccgccagttgtgaagagactgctgggatggaagaagtcagctggtgggtctggaggagcaggcggaggagagcagaatgggcaggaagaaaagtggtgtgagaaagcagtgaaaagtctggtgaagaagctaaagaaaacaggacgattagatgagcttgagaaagccatcaccactcaaaactgtaatactaaatgtgttaccataccaaggtaagttttgttagatcccaggtttgatcaaattatgtcaaggaatctgaaggaaagttactgaatttgtgttcctttcaagttgcctgtaaaaagtgatgattgaaatatgactgtttttaaccttgtataaattgtttttgctagctgacttgttttataaattattttcttgaatagtgaggtttaatcaagctaaataagatacttagatttattatcttcattgcctacatttgtatgttatcctcatttccgtgattgaatgatacttgaataaagaattgaagctttttctatcactaacatagtagcaacctacagttttctcctcctttagtcaaaactttcatcaggggtgaaaagaggctgctcactttttaatgaattttatatggtttttctttgcgttgcagcattgcttccaagaaagaatagtgtgttaggtggcttcttaattgttgtaggcattagtcagaacctgtcttaaagacctgcctcttaggttaggaggacctgttactttaaaagtctgaagttttctgaggataaatttaatcatttacagataagtaccactgtcataagtattgttttttaattaagtgacaggtgttttaaagtgtgttttactacttgtgtacattacagattttggggagattgttaaatgtaagaattctctaaaatgatagtttgcagtgtcataccgtgggctagcatatagcatgtgaaaccattctacttgactttgaactttgagaagtacacttttgatgcttatagataacagatcccaataacaccagtgcagcctgtctagttgcaaatactaacagtagaatgtttcttgccttgtttggtagaccatccatttctttcccttacttgttttatgtatatcttaaaggttgcttttttggtttgttgatttgttttacaaatgcttattgagtgtttgctatgtagaaggcactgtttctagacatatgaggataacagtgattaacaaaacacaaaactcctgccttcctaagggatagaaatacacgataaacaagtaaacaaattaattataatttgatatggtaatgagtgcaaagaagacaaccaaatgcagtgatatgatagaatgaagaattaaaaagctgctttgggtcggattgtgatgcttgcgtggagcttggagaagcagcagccaactgagggaagagtcttctaggcagagggaagagccagagtgaagacactgaggtgagcttcttgtattagaatatttaaaaggagcccagtgtagatggaggacaagacttgcccaaagcttatacagggcatcctagagtgtggtgagagtttgaatgttagtctgaatataacaggatgcaagtaagtttattctgatggattttaaagaggatcttacatatttttacaaagatttttctggctgcgggagagtggtatgtgtgtagtagggtagatggaagcaggaaaattaggaggctgtgaggaatctaaatgcaagacgatagaggctggactggcgtggtggctgtgctagcacacgaagtaaacagatttggcatgggttttagaagtggaactgaggacttcctggtgaatgggctgagaagtcaagctatatttcattcttcattgtgtagtgcttgggatttcaattaggtaaccatttatcatatgcccactatgtgcctggtgtgctcttcctcactggagttaagatacagtgtttgcttttaaactacttacttcctagtaagggagataaacttagaaaaagatggtttcatgaggcttggtagatgttataaaagaagtatgcttggggctatatccagaggaggcttgtggaaagtttccttctggaggaatactggtgattttgagttgagcggggtaaaggaggaattaggagaagcctgtttcatcacatgtagtgcggtggtgtggagattgggaggtgggggaggattggtgaagcgttccaaacaagttgggtatccttagagtataaagtaaggggtggcaaatggccatagtgtgtataggtagtaaggagtcacttcatgctgtgccagtgttcacacttaacctgagggtgacgggtgaggttggggccgtttaagtgccgtagggtctgaaggctcagaagtcagattaatttcaagtgcaacgtgggttgcagcgagaaaactccttgaggctgtcaagaatggaggccgggagactggtatcacttgattgaagggagctgtgtgatacagcagagatagagccatgtttttgcacaacttcaacaaggctcaagttgccattgcagtgaggttatccagagcagagcctgagagagtctaatcttttagggaggtacagcagtactaaaattggccattgctggtatttaacctgtggaggaggtcaccttagtcatagctcttttccttatttcccattctttttacagcctcttttggagatagagatctctgagagctcatattctggagctgcttcatcattaaaaacatttttttctgccctctcacctgattaatgaagttgaagtgataattgtccattatcttgtttttcactattgaagtttccttgaagcgtagaaatttgcctaatttggtggtttttttagatgttgcaaaaatggagatttgttattattgatcatggtctatcaaaaaaattttaactttttacacactgtagcttagtgccatatattttataaagcttgtttttagtagtagaacaattaaattgtgtcaggttattagtcatttcttaacaactaaatattcttaaatgtaagaaatttagttggaattcagggaactcatttatatgtagagtgtaaaagatgggaagtgggatggaaaagatttgttatggctaaatccaaaccttagcttaaacagaattattcaaaatgtgatacacaatggatttgtaagcacgtttactcagaatttcaagtaaaatgttagtaaagtgcctttatggttttataagccaaaaaatacaactaagttcagctgatgaagaacgggaaacaaattgcttaattttaagaaatggcaaatgttttctgttgaaatgtttactgaacagttcctcctctctactttcagccccttaatattagagtggggttaaagttagggcagaaacatagtcctggctttgtgtccctcccactcccctcatctcattactcttgttgcctctggcagtttaaaagctgtagttatagatacgtcactgtcgctcccttcccaccattttctgtggtgacacagagtaatttataggtagagcttaacctcaataaaagctgcagtgagctaaataataaaaaatttcaggaagctttttcatctcaaacatttttgagtccgagggatgggagacaacttggtcgtgaaatcagaatggcaattgatatttagataaagaatcagacataaggaaaaagctttcaatatattattatccacagtaaagcaaaattgaaattgcagtggggatggaggtctgtaaagttaaaagtaaggactatggggtctaaaatggctattttataatattgattatacataaatgtataggaatgcaaaatttattttcataagcataaattaaaaggactttcctaaggtggtactctgaccatgtaatcacatttttgatctttcatcccaaggaaataatcagaatattgtcaaagattcctgatgtttgtttcagtatcattttttccaccagtccattggaatctgtattgtttttaatatgaattagaaaaaacccagtcctaacctttagtttctttaataaagaacacttaagcttattttataccacaattaaacaagaatagcgaaagaaaagtttatgccactctttataaacatagatgcaaaagtcataaataaaatatcagaaactagaattcagtggtttattaaaaacaaaaccacaaaaacataactaggcatggtggctcacgcctgtaatcctagcactttgggaggccgaggcaggcagatcacctgaggtcaggagtttcagactagcctggccaacatagtgaaacccggtctctactgaaaatacaaaaactagctgggtgtggtggcatgtgcctgtaatcccagctactcgggaggctgaggcaggagaattgcttgaacccaggaggcacaggttgcggtgagcccagattgagccactgcactgcagcttgggcgatgagcaaaattccgtctcaaaaaaaaaaaaaaaaaaaatgtctaggtaatgtttattgtcattcaaggatgactcaactacaggaaatctattagtataagataccacataatcatatttaagaagcactttatgatcatcatggatccagaaagggctttctataaaatttgctattcatattaacaaattagaaataagagttttcttagcttgataaagcatacttctaaaaatgttaacacttaattatgaacttttagagattaattgaccaaatttttagtaatgagtatgggtgacccagaaaagtcctgtatttttttttctagtatttatatataaaagtatatcacttttatagtcagcacaattaaatgtttaaataggacttttgggcaatttaattcgtgtctatttatgacaagactattcttgtcttttttctttgaagtcagttttttctgttaaaaggcaattctattttttttagcattctgatatttgtatgtttatgactgtttttgccttcaaaaagtgtatttctagccagacgtggcagcattcacctgtagtcccagctgcttgggaggttgaggcaggagggtcacttgagcccagaaattccaggctagtgtgcagtgatcacatctgtgaacagccactgcactccataccgggcaacatagtgagagtctgtccctttaaaaaaaaaaaaagttacttaaaaacataaagtagcatgtacataactgaaaaatcaaccatgattatacggtggaaaaatcagtctccctcccacccctgttttttcatcacccagttttcctctgtagtgaacgttgtattactagttcctcatgtgtccttccaggatgtttctttttaatgctgccattaacatttggattttgttttgcctcttagaaacgagacagagttttgctcttactgcccaggctgcggtgcagtggcgggatctcggctcactgcaacttccgcctcccaggttcaagcgattcacctgcctcagcctcccaagtagctgggattataggcatgcgccaccatgcctgtctaattttgtattttttagtagagacagggtttctccatgttggtcaggctggtttcgaactcctgacctcaggtgacccgcccgcctcggcctcccaaagtgctgggattacaggcatgagccaccatgcccggccacctcttacagacttttaaacatcagagtaattagtaactttatgcagactgtcttggaatagagcagttgtcattaaaaaaactgtcatcttttatttctaacctcatgttcatacccttttgcttctctaggtaaccaggaatagctaaagagaagtctttttgaacccaaactgtagtattcttccattcttaagcaactgctttttcataataggataattctttcttctcattcatacataggcatgtgcgtgtgtctgtctgtatcgtaatatgtatgaaacactatggtggagggaactctgaatttcaagtttgataacctgtttttgtgtcagcttctttagtattgatgaatgtagatcctagggaatatgactgtactttttttactgttcacagctgtgaaaggcagtagtgctatctgagtactttcacagtatgacttttgggtccattgaaataatgtaaatgagcttcataagctataaaacattatagctaggaatatgatttattggaaatattcagatattctaggtcttcgttctctatttttgtttttcaggagaactcacattaaattgtagacattaaaatgtattgtctctgcttagaaaaagtttttgccaggcaacattgcatgatgtataatttagtttattaaatgtataaaatttgttgataaagtcagagcaataaaactttataaatatgaattagaactttgaggttatggggaatagggaccttttatcagccttatcatccagtttgtcatatacagtttataaatgtgaaagcacttgtgatgaggtcaagtatcacgtgaaacacactttggaaggcactttgctaagccctggaccttatctggtgcctacatttacagttaggtattttgagggggctcctgctccaggacctggtattcaaagtcccttgtgtatatggtatattcttgcatggggcatttttatcacttaccttatcagggaaaatacctacctgccctaggacctttgtccctttataaaaattactgaaattatacctaaattaatcaatttctgtaattttatcatgtaacacctgatgcaatgaacaatataccctcttttcttgtcctgtttaacatattagcttcaggaaagagtcaacctagctaaaataggcatttaaaaaattacagtaatcttttgttttcccaacatccttggtctgtttccagtccttttttttttttttgagatggagtctcgctctgtcacccaggctggagtgcagtggcgtgatgtcggctcactgcaagctctgcctcccggattcacgccattctcctgcctcagcctcctgagtagctgggactacaggcgcctgccaccatgcctggctaattttttgtatttttagtagagacggagtttcaccgtgttagccaggatggtctcgatctcctgacctcgtgatccgcccacctcggcctcccaaagtgctgggattacaggtgtgagccaccgcgcccgactgtttccagtcttacctggaaccattctaggctacccaggcctttttttttttaaagtatttaccatccagcccaaaatgtcatacccaggacattcttatgtgactacattctgggaaaaaccatactgtttactccttccccttcctgtcttgtagtagagtccttccaggcctgtgtggtcctcactggcaatataagtaaatgtatcactatccaaagtgcctgagatagacaatacccacacatggactatggagagaggtgagataatagtaaaacagcagtttaggatatcttgctttaaatcttctgttgtacttgggctaaaatcagaacgtctcttacagttctgttgttttcatttccttttttttctttttctctttttcaatttagatattttctgttgatctacttttgagtttactgatcctgtttttgtgctgtattcagtctgttaagcctacgtaagttcttaatttcaaatatatccttcagttatagtatgttcctttgatattatagaccccaaatctgttgaaattctccattttgtctatttccttaatatatttataatagttactttaaagtcttctgtgtggcagttctaatgtctggatcatctgttggtctgcttctgttattgtccattcttttctttctcaaattttcctgcattttcatgtcatacagcttttattgtatgccatatgttttgtacattatgtaaaattcactcataaagatcttgcaaataatgctctccccagagtatttgacctttcctacctttaccaggtagatagagagaagctccccttaatctaattagcgattgagctgggtggggctagactgccattttaatttggtttagtctgccactggattatacctttcctgcaaacagcgctccagggattttgattgaaagcttgttagactgtcacctaacccctgaaacactgggagattcacttctactttttcgaagtatgaggtgactttgaaagtatgagctctttagcctcagctttaagatctgataagcgtcttgagggggaatactcatgtgactgtcaaaagttctactgttttattcctcagagcttcttttctcagaccaagcctttagcctgcacctagaatctacacgtgactccaggggaggaagtgataggcatttgtcagttcacctagaaagctgctttgctgcagttttagttcatctggatctcattagtttgatagctctccattgtcttttgagcaagttttttttttttcccttttttcccctctagtaagaacattggactgctgtgacctgcttatattttacctggagttggaactatagcagaatgttataataggaaatgttctggtatttaccaaatctggtatttaccccaaatctgagaacagtagattgccagtaacctgcattcaaaattgaggtgctatagtgttcatgcagaacatgcagaaaagacaccctgagtcaagcattgctacagttaaaacctgttactcacctgtaggctgtataaagatcgtgagttcaagagaaggaccccatagtgaaaagatttttggcgagagtagtatatgttaaggtatttctcccttttgttaatccaatttgaaggacttgacgagaacttctcagtttgacatgtgtctgctgaggtttgagagataaatagactggtacttgacttctatctgaaaaagcctaaaaagtgagataaaggctggagctgcccctgtatcggtagaatgaagaaagggcacaatgggagtgggccagcactttgtcagagtttgatgggtcaaaggtggaagaattacccccatggacaaagtagacgttagtaagacataatagttgaagttggcttaccttgaaaggatcaagaggccatacttggttgaagggtcacagtgatccaagcagacaagcctgagaagttcctgcatcaggaactaactataggtgagagtctgcatttggacttccaacctccacaggactccatcacacattactgtcacatcagattacagtccagccagccacttaagatcgtgccccttttctctcagactccctcttcctgctatttcagaaccgggaggggccttaaaaataatagctggagagtactggaagaggtagcgtgaaaagaattaatgagatagtaagattttggctttgctgtggctggattttaatttctgaagacatttattgttaatacaaatatctggatatgactaggaagtgttgaaatctttttgggattttgtgcagacaggataaaagcagcttgggaagagcttgttggagagcaatgactagagtggtggtggaagggagctcactaagtctagtttgtttcatgagctgtctgtatcctctttttgaaaattgagaattccaaatttagtggttgctggggacaggaagaatatgtggggagaaaagagggatgttacgtgtgtctacgtgaaatacatgccattttaacaaaagccttttctttttttttttttttgcatataatcatgatactggttaaattagccagtgatgctttattttcaaagaaatgttacaactacagttttcttctattatcatcatcgttttccttgaagcggtaggttagtctttactctcaaaatccaacttttaactctgactttgggttatgatgggaagcgctatgaaatggtcttggtgctcttatgaaactgtgatcactaataatacttaaattagaactgaaatatataaggagacttctcactaactccttcaccccagccttttgtcttttagaactttgcttatctttatggttagatagatagatagatagatagatagatagatagatagatagatggatagatatagatatagtttctctgaaatttgctaggacaacggggtttgggggcaatgaaagaaggttttatatttatgtttaggatgatagggacattgagagatactgaacacaaatttataatgaagttaagtaatttaaaagggttttcctgtaatttttatatgatgccttatataatttgcatccacaggtataaaacattaatctatgtgcttaaacatttgcctaaacattttaacatgttatctaaacataacctctatgcataaaagcagtttatcacattcagagtgctatacagatttgagttgatttttattttgtgggatgctaattgtcaaaaattgtcagattataaaaacttttacaatcaaagtcaagcattataaaactgtataacttaaaaagttgaatttcatggaatcacattctgtattgtaatcattgttttatggttgatgtaaagtcatcccttggtatccttgggataccccatatctccaaaatttggagacgctcaagtctcttatataaaatggcatagtattcgcatataacctatgtacatcccccaccatatactttgttttggaggcagtggggagacagcgtctggctctgtcgtccaggctggagtgcagtagtgcagtgttggcttactgcaacctctgcttcctgggctccggtgatcctcccacctcagcctcttgaatacctgggattacaattgtgtgccaccatgctaggctaatttttgtatttttggtagagacagggtttcatcatgttgcctagtctgatctcgaactcctgggctcaagcgatctgcctgcctcagcctcccaaagtgctgggattacaagcgtgagtcaccatgcccagcctgtattcttcattgttgtattgttattttatctagtttttcctctagtattttctgtccatggatgtggagcccacatatacagagaccaaccatgtattccagattttatgcacttattttaagattagaataacatgtacttatattttatatttattttgtcatttatgttactatttttctttttaattgttaaaaacagtatatattggccagacacggtggctcatgcctttaatcccagcactttgggaggctgaggcaggtgggtcacttgaggtcatgagttcgagaccagcctggccaacatagtgaaatcctgtgtctattaaacatataaaaattagctgggccaagtgtcataattccagctatctgagaggctgaggcatgagaattgcttgaacccaggaggcggaggttgcagtgagccaagattgtgccactgcactccagcctgggtgacagagactgtcttggggggggagggtatatgtgtgtgtgtgtgtgtgtgtgtgtgtgtgtgtgtgtgtgtgtgtgtgtgtatatgactaaatctagaaaatcgataagctatgttattaaagtaaatgtacctgaaccctttcagtgttagcttttgttttctttaagtaaaaagtttgtatttggaagggcttgaaatacttcaaccatttttagaattgatatttaaatcttttcagtagtagagactattttgtgtgtgggagatactttgttttttcaggggcagcagaaatatcaaacggtatctcagagtagagtttttaataacagcatttggaggtggaggtggaaaatattgagaaagtttttttcaatcatcacctggtccttcttctaagaaaggctatactatatcaaagatgagtagaagtgtcaattttattcttataggactgtgtgacttacaggagtgtgattatggaagttctgttgtctccgcctattttttatttagttattaatatttggaaacctaagctgcttattttaatttggaaggggctttctcaatttacttgtccaaagaaattttctttcctgagaaaatgtctcttacagtgaaatcttcagtttttataattaaacatgttgtgtaaatgttttacatacctgggatattataccagttttattgttttagctttgatttgctatgtttatattacttgtttctttttagtaactatatatggggcggaataatgttaataattaaaaatgtggcctctgtctcttccacttgctggctgtaggaccttagacgtgttactttgtgtttccattacctcatttgtcaaatggggacaacagtgcctgattcatggcactgttgaaggattaagcggtttaatatgtgtaagagcttggtacatagttggtgcttaataagtgtgaactatatgtgggatgggattttatatataaaatttgattttgaagtgaaactgatgatgtcacctatattacatgcaccaagagggcatgaaaaggtttattactcacataatgatgctgtctgagtagagcatggcaggcttccaagttggtccaaaaatgacttgagagagcagtgataggagactggcttggggttttatggtgattagggaatggggctgtgggctggtttttacactgtacatatgctgagacttgcctggtttgaaatttctctaatatcaacaggtggagcacctgggctttcttaccagcttgcccagattcgaggcagaaggggaagaggaaatggtggggcttgaaacctatcagcagtcaagtatcagaaatggagttggatttcttattcaacacaaacaggataaataaaaagaaaaccacacttagatatatcatggtcaaactcatgaaagagggaatcttaaagcagctggtgaaaaatggcacgcagcatacaaatgacaggtgatcagcaacagagaagattgtaaagtgatatatctaaatcaccaacatcagggagtcataacaataaattgtatctgcttaataaaggaacttaaaaatacatgcagcaaaactgggtagaattaatgggacagaatcacaaatccacaattggagagttcaattagaacaaaaaaatcagtaaagacatagaagttttaagttacattattaagttacattattaactacctacgtgatatttatagaatactaaacccaacatgagtagaaatacaagcgtttcaagtgttcatggtaacttcaccaggaaagactgtttacagggcacaagtctcaatcaattttaaaagattgaaatccaaagtatgttctctgccaccaatagaataagaaattaataccaataagacatctgttaagaattggaaattaaaccttaaaattctgacttatgggttattcaggggaaaaatgaggtaaaatatatttcaaaccaaattataatgaaaatacagcatatcacatatgtgggatgtagctgaaagagtgcctaatggaaaattttatagttttaaataatctgctaggaaagaaagttacctaaaaagataaaatagaaagtaagtagaaagaagaaataataaaattaagagtagaaatcagaaagccaaaagcgagttctttggagagataaacgcttgttagactgatcaagaaaaagacagagagcccacaatcacaaatgacctatattggtactgaaagagggattgtcatggtaggtcctacagacagtaaaaagattataagcaaatattataaacaattttatgccattaaatttgatgactaactgtaatgatgaaatttaggttacccccagctgatgcatgaagaaatacaagatctgggtagccctataacaatgaaagaatttgacttcataatcaaaagctttcctgcaaaggaaacttcaggcccacatggttttactggtaaatttaagcatttgtgcaacaaatatcaccaatcttatagacaataaactcagaaaaatgttgttttatgaggctcacataaccctgaaaccaaaacctgacaaagatgcaactaaaagaaaagttaaagattaatatatcactaacatacatgagaaaagaatacatcataattgagttctattccaacaaggttagtttataactttcaaaaagtaatcagtgtaagccagccgcagcggctcatacctgtaatcccagcactttgggaggccaaggcaggaggattgcttaagcctaggagttcaagaccagcctggtcaacaaagcaagaccccatttctatagacagataaaattacccacccaggcatggtggcatgcccctgtggtttcagctactcagaggctgaggcaggaggatcactcgagcccaggggttcaaggctgaagtgagctatgattgcaccagtgcactccagcctgcatgagacattgggaccttgtcccccacccccgaaaaaagaaaaattaatcaggtcagatgcgatggcttatgcctctaatcccagcactttgggaggccaacgcagtaggattgcttgagagttaaggagtttgaaaccagcctaggcaacataagactctgtctccacaaaaaaaaaaaaaaaaaaaaaaaaaagccaagcgtggtagtacattcctgtggtttcagttatttggaaggctgaggtgggagggttacttggacccaggaagttgaacctgcagtgagcagtgatcacgccaccacactccagtttgggtgacagagcaagaccctgtcgggcaaaacaaacaaacaaacaaaaaaactatgtaatttactgcattaaccaaggagggaaactataagatcacctcacttggtcaaaagcatttgacaaaattcatcatccattcatgataagcattcccagcaaatgagaaacaaagagactttctcagtctgataaaaggtatttaagaaacactaacagctaaggatttacttaatcatgaaatactgtgttttccctcaagaacaagacagggatgtctactcttgtgtccttattattttaatagaagacctagcaagcgcaatgagtcaggaaaacaaaatataaaaggtttaaagatctgaaggaatgtttcaaaattctgtttgtagatgacatgcttatttatgtaggaaatcctaaagaatctataaatatagccactaaaacaaatgagtaaatttagcaaggctgcactttatagattcagtgtctaaaaatcaattgtatttttgtaaatactagcagcagacaaataggggtgttaagaaaattcatgaatagtagcatcagtactaaatacttaggaatacattaaacacacacacacaatgacctctgcttaaaatgctgaaaccttgctgagagaagttaaacaaatgaagagggagttgtgattctcatatggccaggtatgctcttaccagactgacactccctcaataacaaactgcacaaaattctaaaaataacatgaagtactggagaataaacaaaaataggcatgttttagaggggattgacactcggaagaaggaaatggcgtaggcgaattttctgttttacagcttttgtccatgcaaagtgtgcagggtaggtaaaattccaacacaaaaccaagtctttctggccttgaagcaccataggtaagacttgggagaatcacaactattggagagtgaggagtgaatatcagcaaggagagtttcagaaagagagccctggattctgcctacaaactttgccaaaatcacctgctgatcccacatgtgtacggtagacagtacagccagataatcagcctgatttgaattgctccaggacagagtttgtggtttgaatgcaaccaggttagttgtctggtgaaacaaaaatgaagacttttggaagattgtaacagaacctctaactaccatcagataaaattcacaatgtctagcatacaatcctaaattacctaacatacaaagaacaaagaaaatgtgaccctttataatgaggagaccaaccctagaagacctacatgttggaattaccatgcagtaaactgatggatacacttgtgaattggaaaactcagtaataagttagagtacttaaattaccctgacttcaagactcaccttgaagccatagtaatctgtatagtgtgatactgacataaaaacagataagatagccccacatagataaacactgtgtgcctatatgattttcaacaaagttgccaaagcaacccagtagggaaaggaaagtctttcaacaaatggtgctggaacagctgaatatccatgtggaagaatgaacatgactccaccttacaccagtgaaaacaaaatatttctggataaattgtagtctaattaaagctaaaactataaagcttttataagaaaatataggagaatatttatgacttgggggtaaacagagaattgttcaaagtatatagaaagcagtgaccatgaaagctgctaagttagactccattggtatacaaaacatattattaaaatacattgttaaaaaataagtcagagtgggagaaaatatttgcaaaacatttctgaaaggattgaatctagaatttataaagatttctataactcagtaatgtaaagatagcctaattttaaaatggacagtagttggctacttcactgaagataaaggtccagtaaagaaatggaaaaatgtgtaatatcggtaggcttcaggaaaatgacaattgaaaccacaatgaaataccactgcacaatcatcagactacctataatttaaagactgaccacaccaaatgttgatgaggctttggaataaccaggagctctctctcatacattgaaagagggaggactgtaaaatcgtactctggaaaatgatctggcaatttattgaaaagctaaacatgcatctatccactgactcaagattttcacttctaggtgtttacccgagaaaaaaagaaatcatatttctatataatgatatgtactttcttgaatgttcatgacaactttattcacaataattaaaacctggcaacaggtcaggtgtctatcagtataagaatgactaaataaatcatgcttgttcaagtaatggaaaacgactccacacacacacacacacacacacacacacacacgtcatatacattaacatggatgaatctcaaaatcatgctgagtcaaaaaagacccaaaagaatatgtaccatattccattcatacatagactttccagaagacacgacacctatggtgaaaagatcagattagtggttgcctctggggatgagcgcatggatgccagacattgagaaatggacatgggtgatgatcttgacagggttgagaagtgtacaatgtatgcatctgagaaaactcaaatggtaccattaagatgtgtgtttcatgctgtgtaaatttaacctaaagaaaaaaagaacagcgaactctagttatgtgcattcttaagtgtctagatttgtgttatctgcagcttttatttttctctctgagacagggtctagctctgtcattcaagatggagtgagtgcagtggtgcagtctcactgcagcctccacctactgggctcaagtctcggcctcctgaatactaggagcataggtgtgcaccagcacacccagctaatattttgtatttttgatagagacggggtttcaccatgttgcccaggctgcccacatacacccttatttttaatgttccaaaaagtaagggatggatagagaggttaagtagatacatgagagagcaaaagaaaacaaatccaaattacagaatttagctgatcaatgtgtagggtgcttactcgtaactttaatggatgtttgaaattttttatcatacagaactcaggagaagatggaaagcttgttcatggaagtatctgagaagttggaataaatacttagaaactgttgagtttttcttttctgagatattcctctccaaaagtttgcttgattctttcgttttgttttgttttttaagatgggatctcacggttacccaggctggagtgcagtagtgcgtcatagctcactgtggcctgaaactcctgaactcaaactatcctcctgcctcagcctcccaaatagctgggactgcaggcacatgccaccatgcctggctaattttttaattattttgtagagatggggtctcactttgttgcacaggctgtttgcttgattcttaagaacgtatagggatccagctgtacagagctttctgcagtcttttgtaatagaattagttgttaaaattgtacttattacatgagcatcaaagaccttggaataaagctattcctcacatatctggacattatttggacttactatgttaccgattaggaagacttggtattagtttattttttaaaattctgtttcatgtgtgttcttataaaattatacaaataacagtaccacaccattgtgtggtgagctctacttagagctctgtacagcttgggtatctggaatgtagacatgctctgttctgatttgaaacttagaatgaaaccctgacataccggaatgcacatttggtgactgtttgtttttgaatggttactatttcattgctacaagataaaatcgaaaaacattttctacacagagtgaaggtttaagccagttaaggaccctgttaaactgtctccagatttaattactgcccaattatgccttaattatgaaggaatgtgagcacttattagctattgttgatgattcaacctttttgaaataaatttcttaatatatttcttttatattttcaatttttattcaggaatatctcaaattttcaagagatacagttttttgcatctgtaatgcagcaacttaaaaaatcatttgcacctacttatttctcaatcaggattgtctacattttgcaaataaaatatggggaagagactggattctgaggcaaataaaaggctatcattcttaatcattgattaaaaatttaagtttaatcaaagtagtcacattgttttcagtgatgtgataaatgacatttaaacatttgtaattgaatactacaatctattttgtgtctttcaattatatttgtagtcaagataaaatatacagccacacatagtacttgtaattatggagacttaaaaaaattattacagtgattaactcttcattcctgagctgtttaaatctaaacttttagtcttaagtcacatataaaaatgaaaggattattttaagtagaaataattatggatgcatagttacagattactcccctagaagtctgtattaaatgagtagatcagtaatcaagagctggagccttaggaaagttccttttgttgataatattctgctaattgactaattttactgagtgttcagcatgcttttaatcttaccaaggtggcaacttaggttgttatcccttttgatttgttaaaaaaaaaaaaaaatacactgtttaggcaagaagatcatgaaaaataataaattagtaaaacaatggggtttattacttttgttattggttgtctaactgcagcagtaaatcttgcagatatggtaggaacagtaaaactggtttaaagggttaccagattctgtgatgcgagccaccttttgcccaaagttggtagtgttttcttcaacttaattttcactgcttctcttttctttctccataacaaagatgtgaataaatatctatatccttaacgcaaaaaaagtagtaaattgaccaaacataatatctggataattggaacaaagtgcaaaatgttaatttagatgtgtatatatgtaggcgagtgtatactttgtaaattgtacactagatattaaattttaatttcagttttcaaaagtcagcttattcttagatgaagaaaatctttgatgtgttttactgaaatacttattgtaaaagttattactagggaaatttgataaggatttctattaggtttattaccaagtcatcctgttagtttagtgattaatatactgtatgccaacaaaggtagttgctatattagtatgtttatgactttaatagctgttttgcctctcctccccacctctttttaatttaagctagatatataagcaagaacattacacagttgatgggggataatctgtctttaagaaactgttccatgcaaagaactttgggactttgcgtgagataacatacgtatgcttgttcatctgtatattgatgcagggacatcattgtagttagttaatggtctgctacatcttatttcaacatattgtaatatttcacattaatttgttagtaaacagtatcaaatttgttcaggcagaatttatgagaccaatttttgctgatatttttcaatacatgagagttttaagaatatcctgaagttagatggtcaaataaatttaggaaatgttgagccaatgtgtttgggatattgctatcattgttataataacttaataatctctttaggatatgttgattttacatagcaagtagtcttagtttaacattttcagacctattttctatccttagtactttgtaaacagcttgatgttgtacaggtttctgtttttcacatttgagtaatgtacagacatttcttgtggacttcctttaatattatttaaatgtatagaaacatacttaagtgcaaacttaacgctaaccaaaagacaaatttatactcagttatataacccacaaaattccaattaacatcaatttaataggtgatggatactatttttacataacttgcaggttactttgaggtccctaatccatttagtcttacacagtgcttgatataaagtagctagcttatgaagacaattgtcattaaatatttgtttgtaagatgcacatttttttcactttgagatgccccttataaataaaattgaaagaggattttcaagtgttacacaaataatgttgcattttaaagtagataatcttagattagtgaaatttattgaatgtgtaaaaagctttttatatagttgttataatcagtgctacttctctaaaatttttcctgcatttgtttcttttaatattttttagaaactggccatacctagaagttataacttacactttttattaacaaaatgaaaacctgggagatacagtttttccccagtgttatttaggatgttatgatttaatgtgataaggaatattataatccacttttgtactatgaaaataccagttgggtcaccaaatatgttgtttgctgggtggtacacaaagggctttgggagctcagggtgttgttgggaaatacattgtggttagacagaatctttaaggaagagtgggtgattaaaactgcctcattaaaacctaccaaaggcatcttaaaaattgacctcgtttgttagacttattaaagaattagtagtaaagttaaaaggtggctaggaaggggcagttaacataaattgcacatggaagaaaattggtaccaaaggttcatgtgagacagaaaggacattgtgtgagaaaagaatgatcagggctcaggctggcatgttattatttgtctcttatagtaatgcccaaactgcgctttaaatgatgcagtataggaagtaatgtgcctctaatgttttagaaccatatctttttatagaagtgtcaagatgacattgacttgcattttattctctggcaatattttcttctgttttatttttacaattttggtgaaaggcaatatacattcacatggctcaaaaatacgtatgtttatgtatgtatacacatacaagcatgcatatacacatacattggaacctctcccttcccactctgcacctcaagtaactactgtccatgatgtatgtgtgtctttatgcatatattagtgagtaattacagatctttttacctgtccttttttaatacagggagtagcatattttagacctttccatatcagttcatagggtgccttcatcatatgctaaattgttctatgaattttttgttgggactttttctgttttggtttttacttttctttgcattcttttgtgtttttccttttttcaggtaaattttttataggtgaagtgcacaaatcatatattcagtttagttagattcaacaaatgcatataccagtgttttaagataaagaaatttcaatcatccagaaagttctttcatactctttcctagcggttcttctggaaacaattactgttgtttttcactttgaatttgttctgccacttctagagcttcgtataagtggagtcattcagtgtagatactttagtgttcagcttctcttgatcagaatattcccaagattcatccatgggtcagtaattctttttcaagattgttttgctattcaagatccttagtatttccatatacattttatatcagcttgtcagttgctacaaaaatatttttgctgaaatggtcactgtaatagatataaaacaaataggcaacaatcattagggaattaggtcagatggacatcttaatattgactcatctgtgaatatgctgtatctctatatacttagcttttaaaaaatatctttgagcaaagttgagtttgggcagagttcacagtcacattgttgatgtttttcccttgtgcctctttctttacagggtatcttccttcttttttcaaactctctggcagccccaaatgtgtcctctgattctaggtcagtaaaactgcagttttctaaaaacaacccccctgcagtgttctgtttgaattctagttgccctgcctagctgtggctggggagtgcccttgggtacacagccacagaaatgcagctctcatccagtacagtttgcagctttgacagttggacctcccttcagcttttgtctgtttttgatctgtgtctgctattttcaaatagttgattattttgttcagagtttatcattgttatatgaaggaaagttagcctaattgaggctgctctgccattactggaattagaacctccattctgttttgtgtattcttttactaattgcatactgttttaattattgagaatttattatgtgcttcagaatctggtaggacaggtctttactatttgttagaattttctggtcatacttatttgttttggcttattacagtatttggactaatacctggatttttaaaacatttatttttattgagattgcatcaaatatataaatttggtagagttaatacctctatgatggtatcttcctgtgtagggacgtatgtttttcttttttgctcagtgcacttttgtgttctttagttatgtttaaaatgtttctttgtatagtttgacacagttttaattacatttatctagatgctgcttatacaactctcactatctaagggggattggttctaggatttcccactcataccagaattagtggatgctcaagttctgataaaaaatggcattgtaagcctgggcacgttgacttacttctgtaatcccagcattttgggaggctgaggtgagaggatcacttgagtccaggactcaagagactttgtctctacaaaaagtgttaaaattagccaatcgtggtgacacacgcctatagtcccagctactcaggaggctgaggctggagaactacttgaggctgggaggtcaaggccgcagtaagccttattttaaaaataaaatggcattgtatttgcatataacctatgcacattttctcatactttaaatcggctgttcccaaccgttttggcaccaggagacagagtcatgaaaggcaagttttccactgaccgtggtggtgcggcaatggttttgggataaagacgttccacctcagtcatcaggcattagttagattctcttaaggagtgcccagcctaaagccctcgcatgtgcagttcacaatagggttcttgctcctatgagaatctaatgccactgctgatcttccaggaggcagagctcaggtggtaatggtctctcccctgctgctcaccttctgctgtgtgtcctggttcctaacaggccgtggaccggtatcagtctgtggcctctgagactcctgctttaagtcatctctatattatgcataatatgtaatacattgtaaatgctgtgtaaatagttgttataccatattgtttttaaattttgtatttttcaattgttgtattttttagttttaaaaatttacttattttttctactttttgatccacggttggttgaatccaaggatgtggaacccttggatacagagggctctatgttttattataaattggcttattttaaaaaatattttttattatgtaaacaggcaatgattttactagctagaagcaaatttaatgttttaaaataaaccttccaattttgttaggcatgataatgatggaactgaggcttaaatataccctatggcagcagttggaaagtggccgaattagggttggggtctagatctgtctgcctctagattgattgcaagttcttaacaattactgtttattcttctctgattcctttcaaggattaaataaagtacaatgtaaacttcatgctctattttagattctggttctcatgtgagtcccagaataacttgagtgaaatgttctgatacagagcagaatagcctcttgtgctacacttttgttaattattttcaaagaatagtctcctgtataccatttctttaatagactcagaagtctgtagaattgaggtgattctgttgtgatttaaactacatcatgctatatgtttccaatagatatttgaaaatatcttttaaataaaccattaatgtcatggtttttaaatcagtatatctttggaaaaaagggaaaggtctaagccttaatttacctggctttttctggcttttatagtctggtaaattttgcagcctgaaaaagcaagagaatctataaaatacttgaatgagatgctggaaaatttcagaacaggttttgttttgaactgtcgggtcactgtagcccccaaagcagggcatgatgtgttcctgcagcctgatagctatgtgacagcacctgtagtactaaagccaaggatgccaggtggttctgttgcctggccacaggaagccagcgcttctcaccattgccctttgaactgttgatccagttaagctcactaacaatgtgtaaatatgaaatttaatcaattgcttgattcattttcaaaagatgttttgaaatactcctttatccgcattgaagttttgatgattttgtaatatgtaagaaatggacttttcagaaaagtacaacttagtacttgagacattggctgtcaaagttccattccaaaacttccttttaagctctctttcccttctctcactgaccagaagttactatgaaatgaaataaaggtagggaaaaagggagaattatctctgagctgcccatattctggagagaaatgtgggagaaaatttttaaggtggtatactaaattagaatgacttcaaagtctatttctttatttattctagagatgagaacaaaataattttcagtaaaacttaaaaatatcatgaccagataacctgaaaatcttaactgtggatgcatgtctatttttattgggatttttttctatattaaaaatcagttgacatctgtttttagataattttttaaaaaactggattataaaatgaagcacttagtaaagctgatggcagaggttttagatcttttgaatacaggaaagtggtaagggcattataggtatgattcattgagctagagggcgttggtgttcacattttaaaaacataatcatgacttatctggagtcacatgttccattttattggcttccttcatatagaaaatatagtaaccagcactacatgcctgtgaaaaagtgaagcaattgtatattttctgggtgaaggaagtattctgtacattctccatgttttacatcatggtattttgaataaccatgcttccatgttcacatcaattttttgtttttcaatttatgcacagcacttgctctgaaatttggggactgagtacaccaaatacgatagatcagtgggatacaacaggcctttacagcttctctgaacaaaccaggtgaatattctgccctctgtcgaatcttagagatcttgtgggaggggggtatattttgaaagacctatatggggttgcttagtataattttgcctaggatgtttccttaatgtaaaataaggcatagcatttaaaatatctgcttgccagtataaaaaatatattaaatgtttcagctgatgttttaatcaatgcaattctagtttgaatcttctttaaattactgtatcccctaaagaataataattttgataactatatatttattttagcttgagatcagattataatctgttgttggcctaatttttaagtagatacatgatgagttttgctaaatttcttgttatcagaatctcatctttatactaataaatacatacttaatgaaccccttatatcacaattaacagtaggttaactcatttttatgttactttttttaatcacttcattttcttttttgcgtatatggtatttgttcatttcatctcatcatattcatcaccatccacatttatttgtgaactacataaatatacctcagttctcaaaacagtcacaactgggtaaagagttgcagtagtctgaggaagttactatcacatcattgttggtatttatcattcttcacactagttccttttctgactcttcagtcacctccagaattaatatccttagaagcatctctaaaatgagtttgatttactaaacatagaagttgacaaagtttttcaagtataactgcataaactctcttttttaaaaaatcagtttttcccaagttgttagcctttcattggcatttgagtcatttatgtgacatatttataagaaacatctgctagtgctgctgcatacttttatcagatccattaaatagtacatttttgttcttgattctcactaaaactaactaaatggctgtcattcttttctttatgcttttattgtactaatttagcccatttgactgcacttttttttttttttttttaaagttccctcctttcttttccccttgcttcccaacaggtctcttgatggtcgtctccaggtatcccatcgaaaaggattgccacatgttatatattgccgattatggcgctggcctgatcttcacagtcatcatgaactcaaggcaattgaaaactgcgaatatgcttttaatcttaaaaaggatgaagtatgtgtaaacccttaccactatcagagagttgagacaccaggtaggaatattgcaagtttttttcttggttttgaattaaatgcctgaacttcagtatatttaagtactcttgtgacccaggaaaattttagtgtaaattctaataaattaccttaaattgtgcatattatttggtggtaattaaaatttttttatttttaaaaatttttaatgagaaaacatatctgtttcttggaatagcatatgatttggcatgaaagtgcatatccaggaaatcctgtagattggcagtctgctcagcgctatgctgatgtgcttctacatgtccctgctgcagtaacattttcaagcattttgcacttggagtgcttttagaagtactttaatgacatcatttgtatgtacaccgtttagtaaagcttgtaacaagacttttcatttagttagctgtctacctgaaactattaaaaaatatagcagtagctgcgtttttggaaaatttcctatatctgattttacagataaagacaatgttaagttttccaatggggatttatgaacttttatggtaatataatattaccaggatcacattgttcccaaaagtttgagataaattagaacttggaaatttggataatagactacctaagttagagccataatcagatttgtcattttctcagtaactagtatatatcgagtaggtggaccctagctttaaaaattaagctacaacttctcttcttgttgaaaactttaaaaaaggttcccccactcccctttgctctttgccattaacttggatttcttgaactttttcagttttgcctccagtattagtgccccgacacaccgagatcctaacagaacttccgcctctggatgactatactcactccattccagaaaacactaacttcccagcaggaattgagccacagagtaattatattccaggtatttttgccttctgaatctcctaaaacttggatagatacaaattttgttcataagcattcaagttttagtaaattgtggtttcacttttttaaaaatgcttttgagtttttaatagaaaaattggattcgttgggtgattattttgtgaaatgtataagcctagtacattaaacagttttgtttggagaagagttttactttatatttcattttcttttgcagtgactttaatcaaagtactgtgagaagcagaaaagaaaagatcttagtaagtttgtcttagttgttgaagctaagcgagatgcagaatgtaagcaaaacaaatggtgtaggagaaaagtaccccccaaacacatgtaactgaatatccacccaatgatcactttttcttagataacttggtaatatttaacagaaatataacatttctataagaaatataatacttagttctatagacatagcaacacttacatattataacacgaacgtcagaaaacctcctttaattatgtttcgtctgcatctcagtaatttctgatgaaaattgaattcagctacatggttctcaaattttgttctgatgtattatgtgatccagtaatactccacgatatgatatctggccttttcgttttttatggtttcttttttttttttttggagaacaactaatactttgttacttttcttgtatgttttcctttttgtttggttgatttttctccctagcagaaacagcatgatgttaggatgaggattaagctgtagtgtctcgatttctttcttccttttgtaatattcttttattccactcttattttatacactaaaaatatgtaaggaacttaagagcatttacaaaattcttaaaatacagttttagtacatttaaacaattatttctttcatgtatccatcatggaaataatgcttattcattgaagataattttttaaatgtaaggaagaaaaaaaagaaaagataactaagaaagataagttttttttttaaatagctggttttacaaatgggaagtggtttttgattgttttaatgtatatttctttgattactgttttattccagaagaggatttaaagctgctttatgggttgctaggaaatacaaacttactgaagttaagagagggagagggtgggatgtagtatgataacactaggaggagggaaaacccgggactatgaaacagggcaattgctaggtagaaaagggagtggagttgtgtgaacgttggtgtggggaaggggaggcattttaagtcgttagtgtgggaattactgttattcagccagcaatactaaccttaggtataaacatgcagtcttagggacaacacgcatatccagtaattatttggaaggctattcaccagaatgtttagtggctttcacttgtgaagatgtttgggctcatttttcctttcttttttattcctttaattattgagatttgagtattttataaagtagaaaatcagaagtggattatacccatttgcttttctggacagtggggctttatccggtttcaagcaacagcaaaaccaaagggttcacattttattccacttaaaagaaattttaacattttctcaaaaatgctaatagctttattatttattacaataatggaaaaaataaacacagtaagataacgtattttaaggttcagcatttctttctgattagatctttgaaatacaggttaaactcaaaaagcttagcgccgtttaactttattagctttaacttttaaaatatgcataatatgtacccttatttttatgttctttgagtatatgaagataatttattcttagaatttttgttttaaaaatttgggggtactgacacttaaatgaaaagtttgatacttaaagtttgtggttagtttattgaatagatattgtaaaaggttattgaaggagacccttaacctgtatcttctcttcctctttttttttttttttttttttttttgagacggtgttttgctcttgttgcccaggctggagtacaatggtgtgatctcggctcaccgcagcctccacctcctgggttcaaatgattctcctgcctcagcctccctagtaactggaattatagggatgcaccaccatgcccggctaattttgtgtttttagtagagatggggtttctccatgtttgtcaggctggtctcgaactccccacctcaggtgatctgcctgcctcggcctcccaaagtgctgggattacaggcataagccaccgcgcctggcctcgttcttttgataattttaaaattgtttggatatgtgtctttgttatcttgaatcgctcaaaactgttcagtgtaaatgtaaaactgatgaaagtcttctgaacttatttttcctccctggaattacagttgattaaattgtatacatgtttttattttacatgcagtttattcagctattcagatacctttctgaacataagtgttttattcagacaacatgttggaaataatatattagaatcctaatggttattttcagggagcattttacctctttatacagtagtctatatttgaattgaattttctgcttcaaacacttagactttaccagttaggaatccttggagaaacacactttttagatagaattcagcctggaccaatccggaaccatactctaccatattttaccctatagaacttagtgtaagttgtaagcctgtattatttaatacttttataatccaaaatcttgtgtgttttttaattttctaagtactcataaaataacgatgttcattagattaaacaacaacaacaaaaaattgtagttactgatggttttgcagcctactgattcagatctgaggcatttttaaagttacgtttttggctcttgccccagaatatgtacatataggaatgagcaagatacgtacataatgtgtatgtccagagagtaggattttattaaaagtggatgttaaggattcactgcaaaatttggacaagatcctgaattatacaccctcagtatgcaatattactttttataatattatataacattattatttgttatttggagtgattcattggttatctctggtagctgagagaaaaggtagtgagattatgttgcagctgtgcttgatttgttttaaacttttgtagaaacgccacctcctggatatatcagtgaagatggagaaacaagtgaccaacagttgaatcaaagtatggacacaggtaaaaaaaatgtctttgaaaattcctcagttattagatatacatttcttgtattgtttgaaattcacaaaagatgttactcttaaatttagagaagttgagacgcataccaaaaaagatgatcttctatcttgatttaacatatctgaactaccaaagaggtccatgttgtcactgaaaaattataacgtatgctactctgcagaataattgttattttttattagagtaaatgaaaatttgaaaacatgcacatacttttatttctttttaagtatttgcttctgttgaaaattttagtaaccctatgactaagtatctctctgtgataaaaaaccataattactcaaataacagattttcagaggaatttgggggtgaaggatggggatcagcttttcactgcttttttaacctaatagtgagttttgaattatagtagattaatttcttatgcttagctatcaactccaaaaagtgatgaagaaaaaaattaaagctttaaatcacgtcttacgtaataaaatgtataactcagcagaactaataaactaccagtgaaatcactttgatgtcattgtaattgtccagtttgattcattttacctgtctgtatcttaactgttggacaccttaatatcacaacctgacaaattataccatcagtctttctccacatcttaacactaatgcattcttggttatgataatctaaattatttttaagtggattaacattggtgggggagggaggggttacaataattctcttgtttaaatccgtttttttggactcccaggtaaagaagtttctgctgtagctaatcatacatttgggtgtttaggagtaccagataactaagaaaggtagataatctaatgaacgttggaaataacgtgttatacatcttaatgcaaataatatttgactttccacatatgttttactaaaattagatgacactcttcttgaagcaataatattcttttttgcctgtgatggacagctgttactgtgacatttaaaagtgaatgatgggaaaagatactgaacgtcataaaccacagtgagatactacctcacacctactagatgctataatcaaaaaaggacaataacaaatgttggtgaggatgtggagaaattggagtcctcatatatcgctagtaggaatgttaaatggttcaacactttggaaaagtttcctgttcctcaaaaagttaaatacagagttaacatattgtggccagctatgtatccaagtgaactgaaaacatgtctactcaaaaacttgtacatgaccatttatgcaggcattattcttaatattcaaagttagaaacaactcagatgtccatcaaatgatgaatggatgaataaaatgaggtatgtttctgcaatggaattattcaaccatgtaaaggaatgacagtatagcatgacgtgtggcaacatggatggaccttgaaagcagtatgttaagtgaaataagccagaaaaaaaaggctgcagggattctaatttagtgcacagacacctattcagcaatataactgaaacacaggaggagcaataatacaagtattcgttatgtatgataaatgaatcaaagtacaaaagtggagaataagctgaatcagccagctaaaataattgcagtgttggggctaactttgaacccaacctaatatttctgtttcagtggagcagtgttactggctttctgaatgacaggtttaaaaattactgtatggcaatgggaatatgtgattcatgagatgccaacagttagtttggctgccagcctcttacccaatatcagtttctctcttggggccatggcaagaaacaattctgactgatgcagggctccaatttagaacaaagttggccacctctctaactctggttcataccttccagaaggaaggacataattaaattcatctttcataacctgctgttaaaaataatgaattgaaattttttaaaagggcaaccagaggataaattaggcataataagtaagtgtacgaacaagcacttgttacttttttctttttttttttgatttagattttgctggtcaagactttattcttcctttatagtggatattagagatcaggctggacatcgtaagaaatttataagttcgattaacctttgtagtattgtataatcagtcccttttcaagtcatgatttttatgaacatatttgttcaaacaggtatatagagaaatagaatataatagatcataagatgtggatttcataactcacaattcagttttgtatcttctacatacactgtgcttggtccaagatacacaaagagacttaaagggttttttaatctgcctgtgtcccagaagataaaatgaggtgctaacctccaatacctcagaatgtggccttgtttgggagtagcatctttgtaaatgtagttgtttaagatgaagtcatactgaagtacgatgggccctaattctatatgactggtgtctttataagatagggaggaatgtgctatatgaagatggaggcaggtaactggagttagcacctgcaagctgagcaattcctaggattgttgggaaacccaaaagcttaagagaaaggcatggaacagattctccccttgagcctttgagagagcatggctttgctgacaccttgtcttgggacttaggtccttcaaagctctgaaaaaataaatttctgttgttttaagccacccagtttgtggtattttgttagagcaagccctaggaagctaatacagtgagtattaagattttgagagtatcctactaatatgtacacttaattatttgtaagttatatacaggtacttcaagtacatttaaaaatatatacaaaaattagaaattgaaggatgagattaaataaatagaaaatacattttaattttttcttcttgtaaactactagttttttgtactcctagacagttttcccatacactccacttacaagacttactcctcttaactaaatgcatataatcaaaatagcatagtgagactctgagctagactatctgagtttgaaatgttcctcttacatatgctagctaggtaacctagtttttaaatctgtaaaatagggacaataatagcatttaactcatagagtattaataggactgatatttataaggcatctatgtgttctaacctgtaataagcactgtatgaaggtagttaaaatgttaagaggagttaaccattaagaaaaaggaagatagtggattgcacaaagatgtgaaggaaagtgaagaattgagatccagacacagaagcacttgatttttgtggtttaggatcagctctataaaataggaaagtaagatttttgtcaaaaatgaggggtcaggtttgacaacttcaggataatagtcttataacaatgccttttctctgccatgtgttaaacagtttttgatgtagatgtatagcatgtctttcattagataaattttttagtattttatacttttagtgctgttatacgtttttgtttttacattttattttccagttgttcctaggatatgggaaatacttgatttttgtatattcttttctcctgcattcttgttaaattgactttttggttctagaattctgtagattcttgaggttttctgcatacacagccatgtcatctgttgataaggacagtttttttttgtttgattgttttttgagaaggagtttcactcttgttgcccaggctagagtgcaatggcatgatctcagctcactgtaacctgaacctcctgagtagctgggtttacaggcatgcactaccacgcccagcttatttttcgtattttagtagagacggagtttctccacgttggtcaggctggtctcgaactcccaacctcaggtgatccacccgcctcggcctcccaaagtgctgggattacagccgtgagccactgtgcccggctgacagtttttctttttttccccagtcttcatgcttttttctttttctgtcctaactaagacctacaataaactgttgaagctataagaatggacatttttgcattgttctgattataggaagaacacatttcacaattccccctttaagtatgatgttaattgtggatattttggagattgtatctgattgaggaagttctttttcctttttgttcttaatgttctaattgtgttttataaatggctgttgaattttgtcaaattttttttctgcgtttataaagaggatcatatagtttcatggatttgaattgttttatttttgagaatttttccatctatgtttatgagagattggtctgtagggttttttcccttgtaatgtgtttattagttttaatatcataaaatgtgttggaaagggctttctcctgttttctcgaagagtttctttaaggttggcattatttctttcttaaatttttgatagggctgggcatggtagttcttgcctgtaatcctagcattttaggaggccaatgctggagaattgcttgagcacaggaggtcaagaccaacctaggcaacaaagcaagaccccgtctctacaaaaaaaaatttttttttttttaaattagccaggggtagtggcattcacctgtggtcccagctacttaagaggctaaggtgggagggtcacttgagcccaggaggtggaggttgcattgagccatgtttgcgccgctgcactccagcctgggcaacagcgagaccttgtattcaaaacaaagtttgatttttccagagaaaccatctcttgtaggaaaaggttttttaaattgagaattatttacatttttaattttgtgtatgtgtttgataaacttggattttgttagaaatgtgttcatttcatttaagtcataggattgattaattgagacaggatctcacttcgttgcccaggctggagtgcagtggcctggttggctcacggcagcctcaacctcccaggctcaggcaatcttccccactttagcctctcgagaagctgggaccacaggtacatgctactgcacctggctaatttttgtgttttatttagagataggatttcaccaggttgccaaggctggagaatgtattgatataaagttatttctgatatttgttattcctttcatatatgtgagatccattttaaaatttataatgttagtaatttgactttttaattttttattagaatgtcttgtaatggattaatcagtagtctttgttgtctttgtctcttttctgttttgtttgtattcatctttttgtctgcttacttttcatttaatctggtcttttctagcctcctgtggtgtacatttagatcattgatttgtttataatgtacacatttaaagctataaatttccctctaagctttatgttagctctatattacaaattttatgttgtttttaaattatcacttattttctaattcttcttgattcatgagttatttagaagtttgggtttttcttaggagtgtgaggattttctagatacttcatcaatttctaatttaattctgttaacagtccagcatatagtgtgtgtgactttagtccttggaaatttatgaaaattattttatgctataacttgtaacttatcttgataagagttccatatatagttggaaagaatgtatatactatagtgttccaaatgtcatttaggtcagggtggttgatagtgtttacatcttcttaattctttatgattttttaaaatctccttattttgtcagttatgataagtgttaaaattttcagctctgattttagagtcatctgtttgtgcctttagtcctgtcagtttttgcttcgtgtgtctttaacctctgttattagatgatacacatttggaattatacatcttccaaattaatttgccctaattataaaatgcatttcatattaacatcaccatatcttctttcttacctctggttacatgatatatttttaattgtttcagtctatccgaatctttatatttatggtgtgtttcttgtggacagcatatttttggttttatttaatctaacaatttttgtcttttagttggaaaatttagtccgcttatatttagagggattattgatactggctttaggctaccattttgcaattgtttgtctatttgttctctctggtttttatctgtttgttttcctgccttttagactaatcaaataatttttgtttcattctgtttactctcttggccttttaccagtaacacttagtattattttctcagttggcattctcgtgattacattgtacttatgttatacctagaagtttatttaagttgtaatattttacaacgtcatgtaaaatttaagaactttacaccactctagtttcattcatctacttctgttgtttgtactattattgacatgtattttacttaataaaaatatataaaccccaaagttcagtgttattttttgcttttgatatcaagttgatttttaaaggaaattagaagggataaaaagaagtattttatattcacctacatatttaccagtttggctcctttttgctgctttttattcctttactacagacatttctttcagttgttttagcaccattttgcagagacattcctttctccattgatttacattggctcctttgttgaaaatcaagtgataatatgtatgtgaccctgactttgagtctgctcttaatccaattaaatgaatttttcatttcagatcctttattttttagctatataatttccattttaaagtcttcgataatttgtgtccagttaatatgtaacatggcctgcttttgttgactgttttatctcttgattatggggtcatttttttccccctccatctttgaatatctcttgttttttaattggatagtgggtgttgtatatataataatattagagattaaaatagataacactttctttggaaagaccaactcttttctctatttgccaagttgaggagctgatcctttccctgcccttaggatttgagttggaaaggtgataatttggtgctttaatgtcacatcactcaggtttcagggagggtcagttccctaccttatcagaactttcagatacaaatatggcaagactgcatattcttatttctttccagccttgcccaggacttcctatgctaacatgtactcagctaaagacatgtattaaaactgactggtgaagaggagctctgtgcttgcagcttcttcgattcctgtcgtctgtgcatggccattgaaattttagttggcttctcctttggcaagctcagtcctttgtctgtgtcctgacttggcagatgctgtcagtagtgaaagtgattaccactctctgttaactggggaggagctcatccctctctgtaaattagttcctatggacttatttggatctatatctgtgtgataactttaaagaaaaatagaatttttctttgtttatccactgttttcttactgctatttcagaagcaaaggttttccccaatcttctacatactaactataaggggaactctgtaggagtttctaataaaaacaaaagcagccttttttctcattatgaacagaattatgctctcatagaaaaattggaaatatgtaaaacctaagatgctatcgcactggggattaagttttttaaaacaagaaatgaaaaaatgatcattcatgcattatatatttcataagctgaatttgatgattataatgttgtatcactttggcagggaagcttaatctcttatttctaccattattctgtgtcagataaaagttaaacagtgttctacacataagattatgatacagcatttcaaattatacaacaaatggatgttcattataaaaaattagcatagtcactttgggaggccgaggcgggcggatcacgaggtcaggagatcgagaccatcccggctaaaacggtgaaaccccgtctctactaaaaatacaaaaaattagccgggcgtagtggcgggcgcctgtagtcccagctacttgggaggctgaggcaggagaatggtgtgaacccgggaggcggagcttgcagtgagccgagatcccgccactgcactccagcctgggcgacagagcgagactccgtctcaaaaaaaaaaaaaaaaaaaaattagcatagttaggcaaaataggaaaacttaagcattatatgtaattgcatctagcaaaaaattaaaattttaaaaggttcaacttttaccagaaattaaaaaacaatgctgtaatgaacctcattaaaaaatagctagaaaatgacagagaaattcagtaggatgtcagattctagagttcctgttcttgtttattacactatatgtctggctggttttaggtgacatgggggagaagtgggtgcttttgatacatattgctgaggcttagaatatgactagtgatcatatttgggttaaggttgaagaagcaacccaggatgattcccagttttctggaaggtttgtgaacactttagtctgtattcagtaaattagactttttaaagcatacatttttattgtatatgtttaaggtatataacatgatatttggtgtatgtagtgaaatggttgctgtagtcaactaaatccatcatctcacatagtcacctttttatgtgtgtgataagagcacctaaaattgacttactaaatttccagtatacaacacaatattgtaactgtagtcctcaggttgtacattagatctctgggcatatcttacatatctgcaactttataccctttgacctataatctccctattttccccccaacctgtaatcaccattttattatgtttctatgtatttggcttaaaaaaaaaaaaccccacatatgagattatgccatgtgtctttctatgtccacctaatttccttggcataatgtcttccagattcatccatgccaaaagtggtaggatctccctttttaaggcaggataacattcaattgtgtgtataaccctccatttctttatttattcatctgttgatgggacacttgggttgtcttctgtatctttgctattgtgaataaaagcagcaagagtaaaagcaacgtgccacataacaagggagtcttcattagacaatcagctttttcagcagaaagtttgcaggccaggagagatgggtggtgtatttaaagtgctgaaagaattaaaaaacaaaactgaaattagccgggtgtgttggtacacacctgtggtcccagctactcaggaggccaaggtgagaaaattgcttgagcctaggaggtggaggttgtagtgagccaagattgtgacactgccctccaacctgggtgacagagtgagaccccatctgaaaaaaagaaaaaagtacccctgccaaccaagaatactataaccagtaaagctgtccttcagaaatgaaggagaaataaaaaatttttcagacaaaagctgagggagttcatcagtgctggtgtggtgaggatggggagcaacaggcacactcatttattactggtcagaatgaaaaatggtatagccactttggaagacagtttggtgatttctcacaaaactaactatattcttaccatatggtttagcagtcttgcttctccttggtatttacccaaatgaattgaaaacttaggtctacacaaaaacctgcagattgatgttcatagcagctttatttataatttccaaaacttggaagcaaccaagatgttttaataggtgactagataaataaactgatatatccaattaatgtacaacaggtcctcaagtaataatgtcatttcgttacagtgttgatgattggggaatgttggttttgttgtacaattattttgcttaagtcagtttccaaaaacctatggaagatgttaaatgaagacttactatatatgacattctggagaaggcagaactatggaagcagtagaaagataagtggttactgaggctttgtgggaggtaaagaggactaggtggagcacagggcatttttagggcagtgaaactactctgtttgaaactgtaaatggatacacgtcattatacatttgtcaaaacccagagaatgtataacatagccctaatgtaaattatggactttcagtgataatgatgtatcagtgtaggttcattattataacaaatggaccattgtggtttgcggatgttatagggaatttggggaagcagggcaggggtcatatgggagctttttgtactttctgttcagttttgctgtgatcttgaaactactctaaaaaaaaagtcttttttaaattaaaacaatttaatgtcaccttaaaagatataacagattttttttaaaaaaaaacctgggtgaatatttgcaaatagatgacaagtctaagaactgatttttaagtttaaaaacttacaaatcaagaagaaaaagatagttaatagaattggctaaaagaacagaaatacactgtttacaacaaaaacaagaaattaaaaaattgctccttttaaacctatcatattggcagatgtcaacatgtagtgacacggtgtgaagaaacactagcttataaattcttagtgagatgaaacatttttgagagggtattttggcacttataaaagtttaacacattttatttgacatttgttaatttgtcaaaggtttgacgaatgtatcctacaaatatatgtgaatttgtatgcgaagatacatgcacagggatttctgtagatggtttagctgtaagtagacactgctaattcacactggatctcaaataggatatttataatattctaagtggaagacctgtggtaggtgagactccaatagcagcatttatgtatgaataattcataggctaatcatcagttcgttgcctctggtttttttttttttaaaggcttctattaattgttagcttattttaagtttttaaaatttgtcttttttgtaatctgtaattctaacctgtcacatctgactgaacgcctgttaatttaaatgatcctactggtcatttctaagtatttaatagaggagtaaacagttaaaagatatgaatagttgggcagtttcctccatttctaatagtggctttgtttattttatgttggtttcaggaaacagcagtgaattttagctcattgttccaaatatgttttgacctatcttagttgtacctgttgtgacttgccagcagatttgtgacttgccagcagatttgtgacttgccagcagatttttcaaactgagaaaaaaggaacataacttaattatgttgtggaagaccgtactgtcttctaaaaactaagcatcccttctctgattcatttatttatctaggggctaccatttcacctttattgcctggtattttatgtcatggttataatagtgtgtggtagggaggaggtgtgtaagatggtctgacctatcttactcttttttttttttccctctcgagacagagtcttgctctgtcgcccaggctggagtgcagtgggatgccctcagctcactgcaacctccgcctcctggattcaagcgaggcgacctgcgactccttgactttgacaatcgagtagtactcccggttgaagcccccattcgtataataattacatcacaagacgtcttacactcatgagctgtccccacattaggcttaaaaacagatgcaattcccggacgtctaaaccaaaccactttcactgctacacgaccaggggtatactacggccattcttctgccttagccttccgagtagctgggattacaggtgtatgccaccatgcccgactaagttttgtgttttcagtagagatggggtttcactatgttggccaggctggtctctaactcctgacctcgtgatccacccacctcagtctcccaaagtgctgggattacaggcatgagccaccatgcccagcctgacctatcttattctacaattatgctcttggtatacatttgaagcttgggtcatgctcttttaggtaactgtgcctaaacgtgtagagaatgatgatcataaaagaaaatatattttatatttttaataagattatttaacaatgtttatagcaaatgtgttttaaaattgagttgcatggaactgagcagactagttgcgccatgatttttcatatgttgtctgtggtggttcttattttgtatgtttgtgcccccttattttcttgattagatttagcctgtttacccaaaagaagaaacagatcattttctaagaaagtgtaatttaccagaactgactccagaaaatagagctatctgaacaagtcacccttcatagaataatgtctcgtagtaaaccctagaaagttactaactataatttcacagaagaattctaccaaacttttaaagaatatgctgttataatactatttaaacctttgcagaggataaagctgctagattgtcataacattgaccacagagccttacaaacatagcactcatgtaaatcttcaggcttgtattgcttgagactattgatgcaaaaatcctaaataaatattttattactgttagcctgaaagccaatgccatgcttaatgggaaaatggtagaaacattaccctaaaagtcaagagtaagatatccaccgtcatcactgttttatcccaaagtgtgacgctaacccaaagatgattgataaatcttgtagaagggcttttattttagtgctacatgatcaaaattaggattaagagtcaaaagaccaatgattaaatatttgtagctcataccataagaagacttacatccctaatacacataaagagctttcaaacaatcagtaagaaaatgatcaacatcgcaaaagaaaagaacagactatcacaggaaggaaatataatataaacatgtgtaaagctactcaaaattaaaactgtacttgtgaccatgttttcatctagaagcaataacacctcaagcatccctttactatgttgtgactgggaatgtaaactggtacaaccttgatgaatgataattttacccaaatctatcaaaattgcaaatacacaaacctttcgacctggcagtttcttgaagaatgtatctttcagatgtgattggaagcgtgcaaaacggtcaagattagttattgcaatctcaaagcattggttcttatagcaaaagattgaaaatagcttgaatatccatcaatgtgggatcgcgatgttatgtgactaattgatatgtagatagacaaataaggaaacacattgtgaacaatctgatagaataatatagaagatgaaaaacggttaccacttgtatatgaaaagaaaggacacagaacaaaaatgtatttgcttatgtggttcatagagtattttggaaagatacccaaggaaccgtcaatattagatatctttgggaagatgaactgttgggctagaagccaaaactgttgcaccttttatactggaacccccccttctcttcccccgaccccccacaaattaaactaaatttaagcacttacatattctgaattcttggtatttaaattatctttgtattattgttgataattataaccagataaagctagttttatgattacttgatcagaagttctggaaatacttcatttatttttaaatccttttgttttaggctctccagcagaactatctcctactactctttcccctgttaatcatagcttgggtaagttgcacatatgttcccctcatcatttttatactgtatcacctacttaataataaaaatcatctctaggagttattttttatatatccgagaaagggatcctaatgaatagccaaataattatgtatgtggttaaagtagtgctttttaaaaagaatattgacaccatccctcaaaattattaagtcttttctgctggcacatataagaaataggtataatctatttattattgaaatcatattcctcatagaaaattatataacctgttatggctagatttttatggttatgtttattttatgatgtaattaataaaaggtatgtgtattacatatatacacattgacataaatatgtatacatgtatacgtagtatggggatttatatatattatacataatatatataatatatataatatataatatacataatatatataatatataatatattatacataatatatataatatataatatatattatacataatgtatataatatatatataatatataatatatattatacataatatatataatatatatatagtatataatatatattatacattatatatataatatatatatagtatataatatatattatacataatatatataatatatatataatatataatatatattatacataatatatataatatatatataatatataatatatattatacataatatatattatatatataacatatattatacataatatatattatatatataacatatattatacataatatataatatataatatatattatgtataatatataatatatattatacataatatatataatatattatatatattatacataatatataatatatattatataatatatataatatatattatacatattatgtataatatatataacatatattatacataatatgtatataacatacataatatatattatacataatatatataatatataatatatattatacataatatatataatatataatatataatatatattatacatatatataataatatatatatactatatataatatatatatgagagtgtgcacatatatgtacaaatgtgtatgtgtatggtcccttcataaccatgagttcagcatctgcagattcaaccaactgcagattgaaaataatcgggaaaaaatgaaaataacaatacgacagtaaaaactaatacaaattgtatttatttttatttattttttgagacagagtcttgctctgtcgcccaggctagagtgcagtggcgcaatctcggctcactgcaacctctgcctcctgggttcaagcaattctctgcctcagcctcctgagtagctgggactacaggtgcatgccaccacacccagctaatttttgtatttttagtagagatggggtttcactatgttgcccaggctggtctcaaactcctggcctcaaacgaatcacccaccttgacctcctaaagtgctgggattacaggcgtgagccatcgtgctgggcccaaattttaaaatacagtataacaaatatttgtatagcatttatattattaggtattataagtaatctagagattatttaaagtatacaggatgacgtgaatttaagttacatggaaatactacacccttttatgtcagggacttgaacatctaagggtttttagttagggggagccggtcctagaaccaatcccctgtaaatgccaagggatgactatatatatatatatatatatacatacatttctgtattactattattatttttgccctcattttaccctatttcacaatttctcttcggttgttacatgtttggaatttattctacaaaattgtgaggtttttttcttttgcagtattccttatgatatgttttagtcaaactgcagaagctaaatatatagttttccagtgaaataagtagtcttttgactctatggtctgtttctacttgcatgatctttgtgtgttactgctttctggttcttatgtatgagtgggttttctctttttgtagctagggtatctcaccaagagtttgatgttaaaatagacaaatgtcaaaaatatgtcatattttgtatccttttattattactgtttttctttgtgtggcttttgactcattaatctttgctctggctttatcttaccccactttagcttttttatgtgctttagaaatgcaccaagtatggcaagttgactgactttgcctatgattgttttgtatttgaacaggagctagactaaaactactggtaaaacaaagaatccaacataaagtgatttaatgacatgggagaaatttgaaaaaatctggtatgatctatgaaactggagttttgtgtgaaaaatactgaaaatctggtatcatctgtggaaaccgatacagatactatgtctacttcctgagcttttgccagtgcaggctggcatagagcatgtaaagatgattatattaaatctatttttggcttgaattgttcacgcatttcttccttttattatttttttatttttttctttttcagatttacagccagttacttactcagaacctgcattttggtgttcgatagcatattatgaattaaatcagagggttggagaaaccttccatgcatcacagccctcactcactgtagatggctttacagacccatcaaattcagagaggttctgcttaggtttactctccaatgttaaccgaaatgccacggtagaaatgacaagaaggcatataggtatgttttattttccttgttgtgaaaaataaatgctgtatactcataatgtaggcattgcatggtgtgccacatcaagagcttgtgtgcagtaaaaccagctttctctctggtggtttaagtgccgacacatttaagtgcacaggcttcactgcttctaatagatcctggtgatgcttcagctgcaaactcttcaacttttatttggcacccttggtactggaaagttcttcaataaatatgtgttaagataagtttaatttgctgagtctctaccagtcataaaattgccatgttcagatttgggggttaatacttttttataaatcatgtttttttgttttgttttgtttttgttttttttcagtttctttatatagctcccaggttttttccccctttggtgagtttatatattaaatgaaatctgcttgctgttcatctgaaatgagatatctaaaacaagaactgcatttaatatagttcaaaatataattcagggacatctcaaaatgtggtctggggacttctggtagtcccagaaaccctttcagctagtttgtgaggtcaaagctattttcatagtagtactgagatgctgtttgccatttctactctcatactctcatgactgtacagtggagtattccagagcctacatgcatatgattttgcaagagatgaaatgtagatttgataatgagactccaattctgttacactagacatgaatgttgaaatgttgccactctatttttttttttttttttttttgctttggaaatatagttgtttttcatagacaaaaatggtgaaatgttgccactctattttttttttttttgctttggaaatacagttgttttttataaacattgttaatatgtaatggatttgatttttaaatgaattttttaaatctcagtttttatatctaatatggtcattttccataatattcacataaacaaaagctctttggggtcctcagtatttccttaacgatgaagtgaaaaagtgtgagaaccattcataattgaacatcattctcatcaccttaaagtaacttcttttaacagtagtttgcttctgttttttttctaattaaccattacctcctgtgagaagtaatgctggttatcaaagtgtgattttgatactgcaaaatgatagtgactagaagatctattacttggttccaagtggaagttctcaaatcttgcttgatgtataaatttggataatcttattaagatacccagtgtcgctgtaggtgctttaactaaaatagttttttgtttttgtgacttaattggggttctgcaaaaaaatttaatgggttttctctgccttattctcttctccctccaaagttttagattgctgtcgttattggatttttttaaattttttatttctagttttataggtgatattgatcagggaatatagcctgaaaaatctctactttttggacttagtgttttcccaatgaccacgtgcatgactgttttacagatattccatagtcttaacagaaccaccgtaccaggttctgtattaaatctggagtgttagttgtttgattagttttcttttgctgtgtaacaaattaccacaaactcagtggcctaaaacatcagttttttacctcacggtttctgtgggtcaggagtccagacatgggttaggcggtcttttcagggtttaacaaggccaaaattgaggtatcagctggcttgtgttcttatctggagcttgaggtcctcttctaaacccacatggttgtggcagaattcagctcctagatgcctcctgaattccttgtcacatggtgccatccatcttcaaagtcagcaatggagaatgtctcttgtgttgaatacctttcatgctttgaatcacttagcctatgacagtctagtcccttttaaaggattgcctgattaaggttaactgatttgctgccttaattacatctgaaaaaatccttaacagcagcacctagtgtttgattaacagagaatgtatgtgcacctcagggctgagactcttaggtgtcatgttagaactctgcttctcacaattttttttttaattcttatatctcatattattttgcatctgtgatctctcagattctgaaagaagtatattaaaaatctcccagtagaattttttctcacctaatcatgcttatacatctagaggttgggtttccaccataatatatagtttttaaaatggcaaatgactttttgatgtttttacatcttttttcttaacattaagtgggatctctaagaaactacagttgtaatgaagatatatttctccaaacattagtgaattccttcaaaattaactcaatcttttacttatcttaatatatatcatttgtatgaaactattttactatgtgtactttttctacattgtttaaatactttcagtcagtacacatgtattttaaaatcaataaaattattgttagaaaatacttgggagaaatatacagtagtatatttaaagttagacttcagaaagacattatctgtgaaaaagatcctggaaataccttatatcattttagaatttttccaagaaaatgcttccaaagtcacactgaaatagtaaatgttacaaaactaatctcatttgtattttgtttcaggaagaggagtgcgcttatactacataggtggggaagtttttgctgagtgcctaagtgatagtgcaatctttgtgcagagccccaattgtaatcagagatatggctggcaccctgcaacagtgtgtaaaattccaccaggtatggattcaataatgtacataaacctatcatgtcaacttgcttagtttttcttgttgctaattttaggaatcagtagatgattgcatgctcatattctaaaacttgtaacccttttaaaattactttttaataatgatactcttttgacaatttcttttaccttttttaatcataggctgtaatctgaagatcttcaacaaccaggaatttgctgctcttctggctcagtctgttaatcagggttttgaagccgtctatcagctaactagaatgtgcaccataagaatgagttttgtgaaagggtggggagcagaataccggtatgaaatacatatttggttcttaaatttccacagtgtaattatgtttcattgcattcttgcatattctggagttcatttgtatctattttcaatgaggttatagagtcagctgatctttatgtaaaataaagttggaggcctccaaattcaaaactgttgcaaattactgagctgccattatggaagatattaaaacatgcacaggcgtgcattttaacgtaattcagagtgttaaatatcataaaaggggtgtatatgaagggttatgtcagtttatggaaggagagatgtttgcacacggtgctcaaggaaaacttgatggcacatgatctagttgtaaaaggtgcattggatttcaatagtcataaatggggtgggcagagttgggaagtgataatcttgacaatagcatagcaattcagtttggagaatagaaaaataaggctggacaattaaattgagacaaactagatgtaggttaagaggaggaacttcattcagaagtagaaggaatacttgctaatgtgccaggcactgtgctgttttaagtgtagtatctaaaaattattatttctgttgtcaattcattctttgtaaggttgaaatatatgaaattgccatcgttgcaggtaacacatggttcaaactaatacatatttggaaatagacatagaaagctgataatttgcccaaggttacattataagtggttgagatgggactggaagatagttctcctggactctttacctcttttataaggatagtagtaacaattatgtttaagttttacaaaaactaatttgtcatcagtggataagatagtctagattattgatgaattaaacaatagattggatttcacatcaaagagagagaagacttcttgaccatatttaagagtaggaattaagtaaaatacttagtctttcttcaattcgtattgcttactccatatgcctgcttaagaaatattcatgtaatatagtgattgtattcctgcttcttccagcaatttagtcccttccaaatttatttgttttggacttgcttgtctatcttaagttttgtcagaaatctgatttgagattgtgcaatgtgaggtctacttgttgaatacatttaaaaatatatggtatatatttgtatcagagaatgaagacttgtcactatttttttctgagttatattggtagaataattcattttgtgattttgctgtagttctgttttgattattacccttttgagatgttgttacctgttaagaatgctgaatgccgttttttaaaattagacttgacctgagttgatagcaaaattagatttaaattatattgtctaataagatttcaggtcagacttttttttgttcttcagaaggttagaataatgcaaaatatggtaggaatttagtggaagtaagagtgaattacagagagaattccatgtgtatctatagatctgctaagaacagttttacttggtaaagatactgcccttcttcattcactgtggactctgctgttctttaactcacagataaagtaaaatctgtaattacagaagcagtaatatgcagtatgtttttatgagtattgggagtcaggtacatctgactttggaaaatcaagtagtttcctgtaacatttacaaatcaaaatggcaaatatccatctatctgtggatatgtgggtagctaccaggaacttactgtctgtaatcattctggagctgaggaaatagacctaatgtttaggtttctaaaactattttttttaaatttccttaatgtcatcttggttgttagcacaaaaatgaggaaatgtagtaaacaggaaatttagatgtatgaagaatttgtatttaatcgagtggcagccttcttaaacctactccccttgggtgacctggattatggattattctagaaagggaagtgggacaggggagaacagggcagccaggaccattgttaagccatctaccagagtgggtgggtcactagaactgacacccttggggaaactctaggaaacagtaaacagtctacagaattatcctacccaggggaacagaagtgctgggcatgtaaatgtcaatttctgtttccttggttgagggctgctcctggggatgcttctttcctggcacctctagcctttttgggtatatcagagaagttcctgggcacagaaatgcagatacctgcagttggaagttgtctagagcacactgaaaaatccaaagggtacagtggggcactgataccatctgcctcagaaagtgacatccttggaagtacagttttaaattacattgaacatgtgttgcttggagatgaagagttgataatgggcttttctcatatttgaagggctgttagtttgtagaagcaagtggatttattgactttattctgtatagcaaataagatggaactaaaatcagcgcatggaagtgacaggatgtcattgaataatttgtaattctcttagagttgccccttttgttgaagcactattaaaagcccgaatggtgttgctaagagggatgttcattggctttggcagggaaagttgaattccagcttttaacactctctgtggtgtgggtttagcttgggccaaaattttgtttttgctttggtatacttttacttagattctgtttgatatttgagtatctactattctgtggttgatttggtaagtacagttactttatgtcttggtttgcttggacaatcctgattcacgtgtctccttttggcctgatttttttctgccccccaccccgagacagagtctcactctgtcgccaggctagagtgcagtggcatgatctcggctcactgcagcctctgcctcttgggttcaagtgactctcctgtctcagcctcccgagtagctgggactacaggcacacgccaccacgcccagctaatttttatatttttagtagagacggggtttcaccatgttggccaggatggtctcaatctcttgaccttgtgatccgcctgcctcggcctcccaaagtgctgggcttacaggtgtgagccaccacgcctggccctggcctgatattaatagtatctacattctctctcaggtgttccattttggatgatggtgaataataagatcaccttattaattttagtgcgatgagaaaaagatgttcttgtaaatcacttctaaaacaaggtcatcagaagtactttgactttgaggatcaaccattttgcggaataatcgtgtccaaaattatatacacaaccttttaatttctgtaaatttttaatgcagtgtacctaaacatagccattttccctgcctgtggacttgaatttcataatcattttcctgtattcttttaaacagaaggcagacggtaacaagtactccttgctggattgaacttcatctgaatggacctctacagtggttggacaaagtattaactcagatgggatccccttcagtgcgttgctcaagcatgtcataaagcttcaccaatcaagtcccatgaaaagacttaatgtaacaactcttctgtcatagcattgtgtgtggtccctatggactgtttactatccaaaagttcaagagagaaaacagcacttgaggtctcatcaattaaagcaccttgtggaatctgtttcctatatttgaatattagatgggaaaattagtgtctagaaatactctcccattaaagaggaagagaagattttaaagacttaatgatgtcttattgggcataaaactgagtgtcccaaaggtttattaataacagtagtagttatgtgtacaggtaatgtatcatgatccagtatcacagtattgtgctgtttatatacatttttagtttgcatagatgaggtgtgtgtgtgcgctgcttcttgatctaggcaaacctttataaagttgcagtacctaatctgttattcccacttctctgttatttttgtgtgtcttttttaatatataatatatatcaagattttcaaattatttagaagcagattttcctgtagaaaaactaatttttctgccttttaccaaaaataaactcttgggggaagaaaagtggattaacttttgaaatccttgaccttaatgtgttcagtggggcttaaacagtcattctttttgtggttttttgtttttttttgtttttttttttaactgctaaatcttattataaggaaaccatactgaaaacctttccaagcctcttttttccattcccatttttgtcctcataatcaaaacagcataacatgacatcatcaccagtaatagttgcattgatactgctggcaccagttaattctgggatacagtaagaattcatatggagaaagtccctttgtcttatgcccaaatttcaacaggaataattggcttgtataatctagcagtctgttgatttatccttccacctcataaaaaatgcataggtggcagtataattattttcagggatatgctagaattacttccacatatttatccctttttaaaaaagctaatctataaataccgtttttccaaaggtattttacaatatttcaacagcagaccttctgctcttcgagtagtttgatttggtttagtaaccagattgcattatgaaatgggccttttgtaaatgtaattgtttctgcaaaatacctagaaaagtgatgctgaggtaggatcagcagatatgggccatctgtttttaaagtatgttgtattcagtttataaattgattgttattctacacataattatgaattcagaattttaaaaattgggggaaaagccatttatttagcaagttttttagcttataagttacctgcagtctgagctgttcttaactgatcctggttttgtgattgacaatatttcatgctctgtagtgagaggagatttccgaaactctgttgctagttcattctgcagcaaataattattatgtctgatgttgactcattgcagtttaaacatttcttcttgtttgcatcttagtagaaatggaaaataaccactcctggtcgtcttttcataaattttcatatttttgaagctgtctttggtacttgttctttgaaatcatatccacctgtctctataggtatcattttcaatactttcaacatttggtggttttctattgggtactccccattttcctatatttgtgtgtatatgtatgtgttcatgtaaatttggtatagtaattttttattcattcaacaaatatttattgttcacctgtttgtaccaggaacttttcttagtctttgggtaaaggtgaacaagacaactacagttcctgcctttgctgagacagcagttacactaacccttaattatcttacttgtctatgaaggagataaacagggtactgtactggagaataacagatgggatgcttcaggtaggacatcaaggaaagcctctaaggaaaggatgcatgagctaacacctgacattaaagaagcaagccaagtgaggagccaggggagataagcattcctggcaaagagaatagcatcaaatgcaaaaaggttcacactaaaggaaactcctgattaggtattaatgctttatacagaaacctctatacaaatccaaacttgaagatcagaatggttctacagttcataacattttgaaggtggccttattttgtgatagtctgcttcatgtgattctcactaacatatctccttcctcaacctttgctgtaaaaatttcatttgcaccacatcagtactacttaatttaacaagcttttgttgtgtaagctctcactgttttagtgccctgctgcttgcttccagactttgtgctgtccagtaattatgtcttccactacccatcttgtgagcagagtaaatgtcctaggtaataccactatcaggcctgtaggagatactcagtggagcctctgcccttctttttcttacttgagaacttgtaatggtgttagggaacagttgtaggggcagaaaacaactctgaaagtggtagaaggtcctgatcttggtggttactcttgcattactgtgttaggtcaagcagtgcctactatgctgtttcagtagtggagcgcatctctacagttctgatgcgatttttctgtacagtatgaaattgggactcaactctttgaaaacacctattgagcagttatacctgttgagcagtttacttcctggttgtaattacatttgtgtgaatgtgtttgatgctttttaacgagatgatgttttttgtattttatctactgtggcctgattttttttttgttttctgcccctccccccatttataggtgtggttttcatttttctaagtgatagaatcccctctttgttgaatttttgtctttatttaaattagcaacattacttaggatttattcttcacaatactgttaattttctaggaatgatgacctgagaaccgaatggccatgctttctatcacatttctaagatgagtaatattttttccagtaggttccacagagacaccttgggggctggcttaggggaggctgttggagttctcactgacttagtggcatatttattctgtactgaagaactgcatggggtttcttttggaaagagtttcattgctttaaaaagaagctcagaaagtctttataaccactggtcaacgattagaaaaatataactggatttaggcctaccttctggaataccgctgattgtgctctttttatcctactttaaagaagctttcatgattagatttgagctatatcagttataccgattataccttataatacacattcagttagtaaacatttattgatgcctgttgtttgcccagccactgtgatggatattgaataataaaaagatgactaggacggggccctgacccttgagctgtgcttggtcttgtagaggttgtgttttttttcctcaggacctgtcactttggcagaaggaaatctgcctaatttttcttgaaagctaaattttctttgtaagtttttacaaattgtttaatacctagttgtattttttaccttaagccacattgagttttgcttgatttgtctgtcttttaaacactgtcaaatgctttcccttttgttaaaattattttaatttcactttttttgtgcccttgtcaatttaagactaagactttgaaggtaaaacaaacaaacaaacatcagtcttagtctcttgctagttgaaatcaaataaaagaaaatatatacccagttggtttctctacctcttaaaagcttcccatatatacctttaagatccttctcttttttctttaactactaaataggttcagcatttattcagtgttagataccctcttcgtctgagggtggcgtaggtttatgttgggatataaagtaacacaagacaatcttcactgtacataaaatatgtcttcatgtacagtctttactttaaaagctgaacattccaatttgcgccttccctcccaagcccctgcccaccaagtatctctttagatatctagtctgtggacatgaacaatgaatacttttttcttactctgatcgaaggcattgatacttagacatatcaaacatttcttcctttcatatgctttactttgctaaatctattatattcattgcctgaattttattcttcctttctacctgacaacacacatccaggtggtacttgctggttatcctctttcttgttagccttgttttttgttttttttttttttttttgagagggagtctcgctctgttgcccaacctggagtgcagtggtgcgatcttggttcactgcaagctccgcctcccgggttcacgccatgcttctgcctcagcctcccaagtagctgggactacaggcgcccaccaccacactcggctaattttttgtatttttagtagagacggggtttcaccgtgttggccaggatggtctcgatctcctgacctcgtgatctgtccacctcggcttcccaaagtgctgggattacaggcatgagccaccgcgcccagcctagccatatttttatctgcatatatcagaatgtttctctcctttgaacttattaacaaaaaaggaacatgcttttcatacctagagtcctaatttcttcatcatgaaggttgctattcaaattgatcaatcattttaattttacaaatggctcaaaaattctgttcagtaaatgtctttgtgactggcaaatggcataaattatgtttaagattatgaacttttctgacagttgcagccaatgttttccctacgataccagatttccatcttggggcatattggattgttgtatttaagacagtcagaataatgatagtgtgtggtctccagaggtagtcagaatcctgctattgagttctttttatatcttccttttcaattttttattaccattttgtttgtttagactacactttgtagggattgaggggcaaattatctcttggagtggaattcctgtgttttgagccttacaaccaggaaatatgagctatactagatagcctcatgatagcatttacgataagaacttatctcgtgtgttcatgtaattttttgagtaggaactgttttatcttgaatattgtagctaactatatatagcagaactgcctcagtctttttaagaaggaaataaataatatatgtgtatgaatttatatatacatatacactcatagacaaacttaacagttggggtcattctaacagttaaaacaattgttccattgtttaaatctcagatcctggtaaaatgttcttaatttgtctgtgtacattttcctttcatggacagaccattggagtacattaattttcttaatctgccatttggcagttcatttaatataccattttttggcaacttggtaactaagaatcacagccaaaatttgttaacatcaaagaaagctctgccatataccccgttactaaattattatacatccagcagattctgggatgtactaacttagggttaactttgttgttgttgataatactagattgctccctctttaattcttcttctggtgcaaggttgctgcttaagttaccctgggaaatactactacaaggtcaaattttctagtatcttacagcctgattgaaggtgattcagatctttgctcaatataaatggattttccaagattctctgggccatccttgacccacaggtgatctcgctggagtatattaacttaacttcagtgccagttggtttggtgccatgagatccataatgaatccagaacttcaccattgcttagatataagagtcccttggaagaataatgccactgatgatgggggtcagaaggtgtattaactcaacatagagggcttttagatttttcttcaaaaaaatttcgagaaaagtattcttttaccctccaaacagttaacagctcttagtttctccaaatatgctctttgatttacttatttttaattaaagatggtaatttattgaacaatgaaatccgtaatatattgatttaaggacaaaagtgaagttttagaattataaaagtacttaaatattatatattttccatttcataattgttttcctttctctgtggctttaaagtttttgactattttacaatgttaatcactaggtaacttgccatatttctggttctatattaagttctatcctttataatgctgttattataaagctggtttttagcatttgtctgtagcaatagaaattttactaagtctctgttctcccagtaagttttttcttttctcagtaagtccctaagaaaacatttgtttgccactcttactattcccaatcttggattgttcgagctgaaaaaaaatttgatgagaaacaggaggatccttttctggtgaatataggttcctgctttaagaatgtggaaatccattgctttatataactaatatacacacagattaattaaaattgtgagaaataattcacacatgacaagtaggtaacatgcatgagttttgaatttttttaaaaacccaactgtttgacaaaatatagaacccaaattggtactttcttagaccagtgtaacctcacacctcagttttgcttttccaaccctgacttgaaaggcatatttgtatctttttattagtgatagtgaagctgtgacactaaccttttatacaaaagagtaaagaaagaaaaactacagcgattaagatgagaacagttctgcagttgttgaactagatcacagcattgtaggcagaataaaaaatgttcatatctgagaatattcctttcgccatcttttcccaaggccagacctcctggtggagcacagttaaaagtaacattctgggcctttgtaatcggagggctgtgtctccagctggcagcctttgttttaatatataatgcaggactgtggaaaacagttggcatagaatattttcacctaaaaaagaaagaaaagacatacaaaactggattaattgcaaaaagagaatacagtaaaataccatataactggacaaagctagaagaacctttagaagatttgtctgaaaacagatttcaagagtgagcttttatacactgctcactaatttgcttgattactaccaactcttcttaaagttaacacgtttaaggtatttctggacttcctagccttttagcaagcttagaggaactagccattagctagtgatgtaaaaatattttggggactgatgcccttaaaggttatgcccttgaaagttcttaccttttctctagtgatattaaggaacgagtgggtagtgttctcagggtgaccagctgccctaaagtgcctgggattgagggtttccctggatgcgggactttccctggatacaaaacttttagcagagttttgtatatatgtggatttttctgataagtagcacatcagaggccttaaccactgcccaaaagcgattctccattgagagtacatatcttgaacttaagaaattcatttgctctgatttttaatcttgtaaagtttttgctaaactcaaaacaagtcccaggcacaccagaaggagctgaccaccttaggtgttcttgtgatttatccttacttccctatgttgtcatagttgcttctaaactcagctgcactatggctgtcaacatttctgatacttattgggatatgtgccatccagtcatttagtactttgaatggaacatgagatttataacacaggtaatagctgaaggtaccagtatggtggtgagactcacacttagtgatccagctaaggtaactgatgttataatggaacagagaagaggccaactagatagctaagttcttctgaacctatgtgtatatgtaagtacaaatcatgcgtccttatggggttaaacttaatctgaaatttacatttttcatagtaaaaggaaaccaattgttgcagatttcttttcttgtgaggaaatacatggcctttgatgctctggcgtctactgcatttcccagtctgttctgctcgagaagccagaatgtgttgttaacatttttccgtgaatgttgtgttaaaatgattaaatgcatcagccaatggcaagtgaaggaattgggtgtcctgatgcagactgagcagtttctctcaattgtagcctcatactcataaggtgcttaccagctagaacattgagcacgtgaggtgagattttttttctctgatggcattaactttgtaatgcaatatgatggatgcagaccctgttcttgtttccctctggaagtccttagtggctgcatccttggtgcactgtgatggagatattaaatgtgttctttgtgagctttcgttctatgattgtcaaaagtacgatgtggttccttttttatttttattaaacaatgagctgaggctttattacagctggttttcaagttaaaattgttgaatactgatgtctttctcccacctacaccaaatattttagtctatttaaagtacaaaaaaagttctgcttaagaaaacattgcttacatgtcctgtgatttctggtcaatttttatatatatttgtgtgcatcatctgtatgtgctttcactttttaccttgtttgctcttacctgtgttaacagccctgtcaccgttgaaaggtggacagttttcctagcattaaaagaaagccatttgagttgtttaccatgtta

SEQ ID NO: 37 - DNA, 129336 bp, Homo sapiens
gcggccgccgcctccgccccgcgttcggggccttcccgaccctgcactgctgccgtccgcccgcccggccgctcttctcttcgccgtgggagccgctccgggcgcagggccgcgcgccgagccccgcaggctgcagcgccgcggcccggcccggcgccccggcaacttcgccgagagttgaggcgaagtttgggcgaccgcggcaggccccggccgagctcccctctgcgcccccggcgtcccgtcgagcccagccccgccgggggcgctcctcgccgcccgcgcgccctccccagccatgtcgtccatcctgcctttcactcccccgatcgtgaagcgcctgctgggctggaagaagggcgagcagaacgggcaggaggagaaatggtgcgagaaggcggtcaagagcctggtcaagaaactcaagaagacggggcagctggacgagctggagaaggccatcaccacgcagaacgtcaacaccaagtgcatcaccatccccaggtgggggcccgcccgggggggacccggggtcacgccggcccagccccctggcactgcggggccgacccagtggggctggagatgggaagagggagagagagggagggagtgagactgtgtgggtgcgtgtgtgtgagagtgggagagcgcgggcaggaagggggtggggggaccccaaacaaaaccatctctgatttgcaaagatcagagcccgaggcttccacgcggcactctggcttccacacctcacattccctttccacctccgggaggggagagcgggttgctgcgggactcggccgcccccactccggggagctggggctggaagttgaggcccgctttgttcggctccgcgggccggagcccctcctccgccgccgcctcccgcccccgcggcccgcgctcgtggaggtggtggtgtctttgcgtttcttttcttcagtcgggtctccccactttcctctacaggaatgcggtccgtacagctggggctgtgggtgaggagcgggagcctagtgattgacagattccttcttcgttctttctttgccttcgggattagcatttttatcgagtatttttagactcggttgtgccagtctcccgccccctgagcatgcacgcactttggttgcagtgcaatgctctgacttccaaatgggagagacaagtggcggaaaatagggtcttctcccacctcccacccccccatcccgactcttttgcccttcttttggtccaagagattttgaaaccgtgcagaacgagggagaggggcaggctgcagccgggcagataacaaaacacaccccaaagtgggcctcgcatcggccctcgcattcctgtagagccttccttcccaaagcgcgctgccatctgtctggatctcctttatccttcccgttgcgcgctagctaggtcgggcgggagcccacagatggctgatagaaggggtcagtgacttcactcccccagggccttccttagcttagatgtgcctggctgggaactgggggtgcgggtaccttggcttcctgtctctacctctcagcctcctttgatgctgaaccaagggagagagcgtgtgtgttgggggctggctcttttgggggtcccaggctgccgaggaatgagtagaaagcaccagggactgtcagccgcaaagggattgtcatccctgctcctgggccagggtggactccatccttggccacctgcttggggcagttgtacaggggctgccaggcgagtcaggcaggcacaaagcaacatctgtccacgggaaccgagggcaggcctcccctggaaataaatgccacatatggtgggagtgcggacttaaattttttttaactgggtggatccagtcaataaagggggagggaaggcggtgtgctgtctggggaagtctctgggcgtgtgatcgggagccagaattgacttcagaggaggtggtgtgatgtgatggtcagagagacctgggatttggttccagctctggttgttaattcttctgtattccttccgtgggggtggctagggtagagtgggtgagtatgctacttctctttctggggaggggtctgccaaacctaccttctccttatctgcctgggtgcattgaagacaagtgctttatgtattgaaacagaagaaaaaaagtggtatcaattgtaaaacaggcagctgtgaaaagtgtttcacagtttacaaagcactttcacatggttttctgaggtcctcaaaaaaagacagaaagcaagcaagcaaccagccatggaaagtagataaggttgttaggcttaagattatcacatttttaaagcagaggaaaccttaaaagagagaggtgaaaaggcttgagtcatagacatggggttctgcctgaatgtgctctttctgctgccccatgctgctttatactttgaagatcctgaatacattctttgctgaatgctaaagctgtgttagcttggggagggccctgtggatctttgtatgtgcggttgcttctttaatctttgggctggtgatagcttggcagagaggccttgctttcccttgccttggtaggagtttgtcctctgtggggccatacctttggcctgccttttcctcttccaaagtcctgctgagactttggaagcctaagacgtgtgaacgctttggatgattctgagagttcaagccaacctgccctgtggccttctcgtgactttgttaggactgaggcatcttctgcctgcctggataggactgaatacaaaagtagattttttttttcatcttttttttcagttagggaaacccagttgcttgggtggatccagacaaaatggattttcatccttggattttgtgcccacgcctctgggtcaccttgtgtcccttggcaacagctgctgctgttttggtcgtgggcagaaaactaaaggccacgtcttggggaggtggctggtttggccctgtgctggtgatatcaatgtgtctgctaagccccatagattgcagtgttgcttgtcaaattgtctgctttcaccacaactgccttttagtttggaaagtagagaaaggaaaatgtttaacttagtcattccccctgtgtgtggggggttggtcactgggtgcttaaaaacactctgcaagatctggactccggggtttaaggagccctcagtctaaggagattaagccaagtgtgttttggctaatatataatcatgagcagcaacagcaacatttggcaattagagctgtatactagggacttccagaccacaggcttgcttctctgtgacaccagctctgacttgtttcaattatcaggggagctggcgtgatacacacttatcgacataaagaaggtgaaagagattggtgccaaggaagtggtaagagcttcatttagatacaccaacaaaggggctgtcaggatactctgaggtctggcaggattggcagaatttacacaagttttataacagcctctcatgcctcacctgcttgagtacctgagtaaagctgcaggtatcttccttgccagtttataagaatggaatcaaagcatttgccgctgaatgagagttggtgtgtgagcgttatatgaggaataaggagctcggcacacttaaaacttagttttctggtagacactggtagcttgtacttccaccagggaatccatgccttggcctcgttgttgggagctagaccaagcttaaagcattgcttgtttggaagggaatttgggctttcttgtgtcagagcacccagtccagtggaaaattggagaattgaagcaaacactaggtctgacacacagcatctactccctccctgtgaatctgatgttttttttttggagacagagtcttgccttgttgcccaggctggagcgcagtggcatgatcttagctcactgcaacctctgcctcccggttcaagcgattcttgtgcctcagcctcccgagtagctgggattacaggcgcccgccaccacgcccagctaatttttgtatttttagtagagacggggtttcaccatgttggtcaggctggtgttgaactcctgaccttgtgatctgcccgccttggcctgccaaagtgctgggattacaggcgtgagccaccgcgcctcaccgaatctgatcttttactgtagcctcctcttattatctccttgacttttgccagggtactctcactttgagaaaggaaaaagatcctagtctttaacatgccttttccagatttctggggatagacctattactaaggctgtagaggcctcccttttctcttggctgcacttcagagcaccatgcccgtgtggcccattggaagcaagcccccttccagctgctagggaggtggtccattatctctttgctcttgttaagtttgattaggggagttccacgtagggcctgagaagaggaggtgcctgcaggacaataggtagctgatgagggatctgactcagctgcagctgaacctaggcgccacttgacgttccctgggaacatttagaaccttggaacatgctgcttgcacctgggagtggaatgtttgcagacagcccctctgttgttacagggctggattttgttgatttattgatatttattggaccctcccatgtctgagtcaattttttaggtaccagaggaggatgcagagacacgtttgagaagctcccagcctgtgagaagcttacacatcagtaagggaaacatgaatagggcattatttgagtatctaactgctatctctttctcattcccagctaccagtagaaatatgagatctagtatggatgatttttgatgggggcgggcgttgatgtgccttttaaatattgtagaattcactatgttaggaaataaaataatgacaggcatctgtttttttctgaaaaaaacacaaaattcaggtcctgtacctgccattttaccacctgcaaggatttgggaatccatttaagtttcacagcttttatatctgcacctgtcaagtcaggatgagataagttctgtggaagtgttttgtgaaccagagaatttgacaggtatgttacgtttatacttcattctgcatcattcattcattattgaattattcagtccttcgttgagaacatactacaatgaccacagcagggtccctgtactcaaagagctccctgtctagagcgggagacagacttgcccaaaggtatgaggcatgagctgcagctgaggaatgtgctaagtgcccagcaatgtggaaacacagttaattctgtgggaggaggtgtagagaggaggagaacccatgagaggtggaaaactaagaaggggacaagggttatccaaaggaagctttttggactgcagtatgatgttgggaactttttggtacatggggatagttccctataagaatgaggacgtctttatcctcttttactaaactgagtgctgctataaatatgttaccttgtaactggcactgaacagctagtgacttgggtgctatattttactccactgtaaagcattttctctttgaagtaaaaagtaagttagtactgcaaactgaaattcaggtttccttggtgggaacagggactttagatgtatcagctcagaatatgacagggagtgttaataaaaagtggacaacttggctgggcacggtggctcacacctgtaatcccaagcactttgggaggccgaggcaggcggatcacgaggtcaggagatcacaaccattctggctaacacggtgaaaccctgtctctactaaaaatacaaaaaaattagccgagcttggtggcaggcgcctgtagtcccagctactcgggaggctgaggcaagagaatggcgtgaacccaggaggcggagcttgcagtgagccgagatcgcgccactgcactccagcctgggcgacagagcgagactctgtctcaaaataaataaataaataaatgaaaagtggacaacttgcagatggttgttttgaaattcaaagcttcggtgtgacctagcttctcatttctctagttaacacttgctgagaataaatcctagacgcctgagtttctgaatgaacataggtgcttttagtggtatattttttaaaaagtctttgcaagggtgaagttttaaatgacaattttaataacagaaaaatatgaatacagtcgcatttaattctgatgagaaatgcaagaagttgatgaaattgaaagaatttgtttcaagcttatcacatcaggaatccaactaaatgagttaaaaaataaatattggtttaataatgtaaacatgtgattgctgtattattataatggaataaaattaacacgatttaatgaactgagcgaccattaatttttacttgttaatttattaggagattttaatgccatttgatgcacagtacagccattattctgcgtgagctccttaatgaaataaataagaccaagcagggcttgcttcaaattggaatcagctttcattcctgttaaccttattctcccacctttattcacctctccttcagcttcctgtaattgcaattaagttctctaagattggaatgcagttttcttaatcagcaagtctcatcaatagtcctaattgacttttgcccttttctcctttgccatattgactgattaaaacaaaagcaaaacttaaagactccattccctcccccaaatccccatctcatagtgttggttggctggcaagagaactgcccaagaaggctgctcatgatggcagcctgctgaatgtgcagggggtggaagttcaccagccatgtgcagacgtgaatggctggtgcagtgttggatgggactaactcctccctaaggaggggtatgaccttctgttggcctctgacaagtccctgagccatggagccttcagtcttcccatcttcaagcacaatggttcctggaaacagtgggaagttgccatcctaagcccaccctacagaagtttggtttctaattttactgtgttctaagctttagaaccgagacaattccaagagaacttgtccagttcatttttatgccttcctttaatgccgtaccaggtgctaatttctgtgccagataatgcggacaaaatagtgaataaggcagatactgtccctggtgccttctgtagcttctagtccactggctgtgaaacacaggttctttggagttgtaagaatgctgtatgtgttcactctttagctaatttgtaaatactgtttttttggtgccaaaccacatcccccaagctctgcagtttattgacttgacaaggatctctctctctctttctctttctctctgtataacataatcctttgtttcgacttaacagtttgagaaataaacaaatctatagcatactatccactgttggttatctaagacccttcctataaacagcagcctgccacagtggcaactgctgtagaatgttttggcagagactcagtttaaaatgaaaacacagtagaagcctattaattaagaagtttggctaattctggactaggcaaaagtttgtttagcaggcctttttgccccataaatgctgtcaaagaaaaattaataaacaagagtttggggattattttggaggtaggagtcagcagaccttggtaggttctagacgtggctctgtttctgattagctgtgtgacctgggacaagtcaccttctttgggcctcgaatgttctcaactggaaaataggctagataaactctattggagggcctttctaacttggaattggtattcatacaagcattttattttattttattttattttttgagatggagtttcgctcttgttgcccaggctaaagtgcaatggcgcggtcttgcctcactgcaacctccgcttcccaggttcaagtgattgtcctgcctcagccttctgagtagctgggattacaggcatgtgccaccacacccggctaattttgtatttttatcagagaccagtttcgccatgttggccaggctggtctccaactcctggcctcaagtgatctgcccgcctcggcctcccaaagtgctgggattccaggcctgagccaccgcgcccggccacatacaaacattttaaaagctcccagttgcacgcatctagttgatcagtgaatgacagatctttcttaattattgatgttccaagactctatcagcctggtgtcaattaatttacataagtaaaaataataaaattgtaattcagcctttaattttggtgatttccctccctcttccttgcctcttccttactctgtgagtctaaatcagtgaaatttaactacaaaggaatatgaaaataatgctaggatgaagatgtggaggctgtgcctcttgagatgcagtgaacagtttttcttcttttgttgctatttttgactattctaagaacaggaagtttacttaaactaatgaccacagatgcctaaaaatggttaaatgtaagaggtaggcattatagaggatacctgtggaaaatgtttgctcatatgtcaaagtttacccaggaagcttcctttatttatttccaagcatctatataaagaaaggctgcacttgattgcgtaagcatgagccttttgttaggcagcgtggatgttgcaagtttaaaccccaactaggaaatgaaaagtgagtttcctcctaaatagttctttttcagtatcacatggctctcccagcttacatctggcaagtttttctcttgagtgctttgccggtagtttaggactccagtattgtattgtattgtttgtttgtttctttatctctgtctctctctttttttgttttttgagacggagtcttgctgtgtcgcccaggctggagtgcagtggcgtgatctcagctcactgcaacctccgcctcccaggttcaagcagttctcctgcctcagcctcccatgtagctgggactacaggcgcccgccaccatgcccagctaatttttgtatttttagtagagatggggtaggactccagtattaagaaacactgtgtatggctttgcctttgaaacctacagagttatgaatctggtcccttttgctgctaagtgttgcatcacaaactgccaagccaagttgtaactctgaggtgtcaccattttttttttcttttcaactggacatttgaaaatagtaatgctttttgggtgtgtgttttttaaaggtctgtttttacgctgtcactgctcaaaaatgccaaaaggcattttttccttaaaaaatcacctctgggctaagcccaaatgtggagtaatgaatccagaaaggactttttgagtagttacaagtggctgaaagcaggcactggtgatggaaattgggtttttccttttgcttcaaatcttcctggttgtaaactttttcttacccttattgaagtcagactcaaggtgggtctaatttctcccagcccatgggaaggcagagtgaattactgcttgttgtgccaaccctttacattttgtgtgtggctgtttgtctctacccagacaggttcttcacatattacctggggagcaggagagggggaggacaggaagagcacagttgggcagaaagagcaaagcctctcaagtctgatgggtttgggtttgagtctgacagttattagctatgtggtgaccttgggtactttgcttcaacttattgagccccagtttctgcatctgtaaaatgaggatgaaactacctacttcatagaaatcaacccaagtggccgggcacggtggctcatgcctataatcccagcactttgggaggccaaggtggatggatcacctgaggtcaagagtttgagaccagcctgaccaatatggtgaaacctcggctctactaaaaatataaaaattagccgggcatggtagcgggcgcctgtaatttcagctactcaggaggctgagacaggagaattgcttgaacctgggagccagagcttgccgtgagccaagatcgcaccattgtactccagcctgggcaacagagtgagactctgtctcaaaaaaaaaaaaaatcaacgcaagtgagataagatgtatcaagtactttgccagtatcgatcataatacatagtagatgcttagtaaacgctcatttttcctttccaaggggaaatttggcagatgatgtccgtcgactccaataggtgatccccttcccatcccgacacacttgctcacagagcattctcctttggagagtctcagttgatataggaaaaggatctacttcaacacacacagagaacatacagacatgccacttgttgatgtaaggcttggcaggctattgaaagagaaacaattcatattcttaggcggttctgccctcccccatcaccttctctatcattattcttaaaaatttgtttggtcgactaaaaataatagtactaaaaacaaacttcgatgaatcaggtctcctggggcgggggatgggtaagatcctgaagcagaaacgcagtgactcacgcgcctgtcactgatagctgcccgtaagtgcatggaagtgcatgatgtttattgttgctggtgtttttttgaggcccaagttggaatgcacttccggctccccctcaagtactagcttactggttaggtgggctgttgagtgagaatggtcaggtccagaaactcatggctctgaaatgacccagacgtggtggctatacccttgactgccctcagatacgtgcaagagggagctcacgcttcaagagtcatgctttggccctccacctggctgtgctcctcttactggggcaaggagactgtagggccaagggacaggcccatctagagcaagcacttcctttttccagatcatgctcagaggcctgacccttccagttccctgcatcagtgtcttgagcctgtttccaagtcctgcgtgggcctcttccccaggtctgttttacttgagggcagactgtgttggccatggacagcatgtgtacctgtgggaccaatggctgggcaaggggtgcaggggcatgaaggaattggctagagcttggacttgtggcctggggactctacttgggtgtgcacaaggcctctgaaagttatgggtggtgctaggggtgggctgagatcttgggctgggtctctctgagcttccacattccattgtgaaaccaagaggtcagggaatcctaaactcaaacctggacttattaaagtattggtcaaggcaggatgatagaacgcattctgtgtaaccgtttgttaccttgatttgtctttaaatactacatatggtgtgtaggccttcctctgtatttttgctcttagggcaggcatttctgtatgtatgtatgtatgtacgtatgtatgtatgtatgtatttatttttgtagcatccgctcagttgcgtggccacaactgaatcccagtccaggtggcaccattatatgggtagcattttggagatgttcacaggaattgatttccctcaccctcaacccaggccagagtgaatttaatgcagatgagggagaaggtgctacatattatagctgctcattcaaaaagtggagcagagagctggaccactgaatgtgcctttgtttgctggaaatctttattaagtaccagagatatagagatgaagttgtgtctctgaactgctcagaggcaaaaaagggacaccagtaaccacagttatggtgggcctgtggaagagacactatagtgaaggtcaaacaaaatatttgggagcctagaggaagaacaggtctatttctggaggtatcagaaggcttcacagaggaggcaatactcaattggggccttgaaggatggataggagtgtaggagtggagtgggaggcagcacagagcacagaccagactgcggaagggcctgacatctagggaaggcaagacagtttagggtggccagagtgtggatgagggagtggccagagaggagttggagaaggatgttgtcaagggctttggcttgccaaacttcgtactttgtgtttggaccttgctctgtaagtgtccaggagattttaaagcaggggagtggcacggtgaaagccaccactctatcgtttcttgtttcatttcctcctcttacccagtggctgttaacagcaggttttctgcccgagttatccaggtcagagtcataatcccttacagtaccatgtggacagctttaggctatgtctggagcaggttgaagatagtgttttgttcactgtcaggagagaagacatgttgttcagccaggagggctcagggaccccaggcgttcaggtaattagccagtgagtcatgtcaggcttttgatatggataccttgggaaactaagtggggtgttgctggcctccatgcagatgcctggtctacccaagcacaggcccccaaattagatctcggcctctgctgggtcttccctgtgcctgacacagtgccttcatatggaccgtctctggtcagtgttttcaatttctttgttgatgatcatcaatcaaggccaggctttccaattccagaccacactgcaatcagtggaaactacctaaattcagtactgcagacccatagcaggatgtatgtttattgaaaacagattatattccttaatgagagactaaaacagcatgtttaaatcagtattcttcattccttttatcattgagagattggttattatttacctcgcctttagagggtcagcttggtggtggtggtggtggtttaagttgctgggtttttaaaagattgagtttcatgtccaaggactgattctacttcatgggctgtttttgaaaacattgctagaaacctcttaactgaaggcaagaccaggggcagcctattgctgcggagtgccctgggttcaaatccctgctccccaacttactgcggtggtgactgtggacatgttgtttaacttatttgagcttccttttcctcatcagtaaaatgggaaaaacaatgacctccctcaaggagggatgttattgaagttatttacttaaatcagattagatttattttagattaaaagcttcttgcaagctgtgaaatgttttgcaatgtcacatattattattttttttttttgagacggagtttcgctcttgttgcccaggctggagtgcaaaggcgtgatcttggctcacggcaacctctgcttcccggattcaggctattctcctgcctcagcctcccgagtagctgggattacaggcatgcaccaccatgcctggctaattttgtatttttagtaaagacggggtttttctatgttggtcaggctggtctcgaactcccgacctcaggtgatctgcccgcgtcagcctcccaaattgctgggattgcaggtgtaagccaccgcacctcgccccccgcatattatttctttatggtgtagaactcactaatactgctaaaaaccctttctgacagagatgggagttaaggcttctaagttcacacccagatttccacagagaccttagagacaatcataaatattgcacaaaattatattggaatatgagctcggggcacataggctctggtgccttgtactagaagcttaggtgagctgttactcttggccatgtccaagcatttgactcagaagatggtcgagtcagcagtgttgactgttagcaaatcacctaagcccactcacatggggtgatcctggtacgtgttgcatggactgagtgtcaactgcatgctgagtgtatgccagagggggtgatctccttgatcttatttacttacctacagtactctgggtacttatgtatttatgtttacagaggaggaggctgaagcattgaggggtcagtggcagaacaggaatcttaactctggtctctggttcctagttctctgagctctaccccatagcccctcaagaaaggatggccattgttgtcctcatacaaaaagctatgacactgctatcattattctcatttggtaaatgacagaaacaaggttcagattacttaggtaagttgctttaagtctcaggctaagggctggagctggatttgccactgaagctctacaccttctagaatctagggtgactacataatttatcaaacaaaccaggatgtttccaagagtgaaaaggggcagcattattaattatggccactattaattacggtccttggccataaatcaggaccgtccaggcaaacctgggtaatagtcaccctgcctctggtcttgatacctgaccaaggtaatggagaattggatccgccagctcatgtgctgttgcttaagtggaagggaatgtgcaaattatgtcctgctattctaagtgaaaggacttgcccaaggtcatgcaacaagttggcaatgtaatattttaaaactggacgagatgttgaaaacatggtaaagttagcactagagcttaattaactggagtatgagttagggaacatttggctatgctgatgtctactactgaagggaaaggaggtggaggtcaaggtcaggtgtgtatggagcaggtgggggtggcagtggcagggcattcacgtggctctactatgtcggcaccatcatcaggccctgtccctttgaagtccgggagatgccactaggcccagtgcaacttggatgatatttaatggccaagagcagagacttctgggacctgacttttcctgctctccactttactttagctctgggcttcaaagggactattggctgggagtggtgaaagtttagtggataatcctgctgaagaattttggaaggccttgaggaaggaattaaaaataacagtaagcatgccttttctttctctttgattgtggtcagtgcatggaatgtgccagggccgctgcggagcaagcacgtggccccgaataacccctccctgccaacggaattctgcagagaacatgtaagggctgtgctgtttcactcctgctttgggctctcagggtttgtttccgcgatcatccaaacctcatcctccttctcttgccccagataatttattggaagtctggagagggacttgagttctctcaactctccaaccagactgttgctgtgggcgaggccatgtcgggtgagctccaaggagagcagttggaatgacagagaggaacggtttcagcctgagaaatgtgaaatataaattcaaaccaaacttggcacctgtttggagagcttcagctgatactacagtgcccctgtcgttagcctttgtggctcagctgggtcttataaatagaacacgatgcatttccccttttgctaccccacagacacgcggaggcatgtgtgggggtggcatggacagagagtattcattacttatgctccagtgcatcagatagtcatcgtgggaactgagccctggtgtcatggggatgactaggccatcttgtgggtaaggctggaagcggcttttgagtctcctgagttacagctcttcttacccttgccagcctcccttccccagctgaggccctcagtccttcatgcctgtgtgccgcagtaagccagttggccccttccgtcgtgagtccatcccacattctgtatcggagcccagcattgctgtatcaggatgcttttggccaaaagtgacttgaaacccaacaaatagcttcaatcataagagggcttattacttccactaagaaggctagaagcaggaaagtcaggcatcagaaggtctcaggagccttacatctttcctcctggccatattctcttcaagcttgtctcctgttggtccaagggtggccacaactgttgcagatattaccgtctataaacgttgcatccaagggcagaaaagggctcctattccttgggggtctctttaggaagaaaaccttccccgggagcctcctggtatcttgttggtcagtattgtatcacatgcagtcaatgacagaaataatggaccctcagaagcctctcgaggtcaagggcccaggctattcctttgactcatcagggtgattagtatggaggtaggtgcttagtaaattttatttgggttagtgcaaaagtaatggcagtttttgccattgaaaataatggcaaaaactgccattacttaggcaccaacttactgattaatgtttgttggttgctggtttccttcgctaagtgagactcctgaacacttactgatgatgtcttgctgacttctgaggacatgatggtaagtctgccctcatggagcttgcagtcaggtggagagatagtgctataattgtgtttggagtatctcctgagtagattgtggcagtctggtagctttggaagaggtgttaaattgaggcccaaggagacaaaaggacctgagaaacagagcagggggactgtctgggcctctgaatgccatgcccagggccacacattttgtgatgcaagccaggttgtttcaggtttcaagcagttgcgatttctgtctccacccctccaccagtcttattttcctgttgacaaaatgataacaacttgccctagggtttgaagtgggggcagggcacagcgctgagagcctcctccctcaggggaaattttctaaagtttctcactgtgttctagcttcaaaaccatatgcagtttaattgcatgtttagtatctttgtgcatctctcttgttttgaatctgctggaaactttctctgaaagcatatatataggaagacataaaaattctataaatgtttagtggttaaaaacaaagtcctgtccaaattatataaagttttgccgtcgtcggacggaactttctgcagatagggaatacccttgagtcttcagtcgcaaagagctaatcactaacttcaagtgtgcaagtgccctttcattccaattcagagaaaacagagcctgtcccaaggcctcgtgttttgttttcctattgatctaggagctgggataacttggaaccccagggaacatctcagagttaattagttttttgaggtcttcttgtttttcttgcttgattaaaagagttacagtttttgctctgattgtttaaaaaaagaatctatcactgctactgatccaagaggtgagggttggcatggggtgggcactccagtaaatacgtaagttgtcttcctgccgtcttgtcctggtggagcagagagaggtgcctttgagcatgggcctggaaccaacagctactttcctggaaaattcttcagtttccagaagcagtggccaggtgagccggggcatgaaaccagacgaagttgccgcagtgcgaggctggttctgtttgcctcagttctgaagttaatggtccaagttcaccactcatagagcgtcagcctgttggggagacggaggccctgacggccatgccagggtgcccccaaccctttgtttaaccacggctgtggaccagtggtctcagatgtttaccatcgcctgtttataagagggaagtgtggtcatatttctatctctcttgtgggctgcacggttgccttactggggttcatgtgggaagtggttaccgttaggaggaggatgaaataacagtactcacaaaaaggctttgatccagggatctttttaaatgtcatcttttggccactgtgtttttttatttttattttttgctatctgctttaacttcaacgatgagaaaatcaaaccatatgctggacatcattctgcccagctgggctgagtcagaattgcagttcaaactacttctgctctccctgggtttcgtgtgctttcaatgtggggatatcttccagatctgcagttctccagagctagggacccctcagctccagctgctctctggacaatacctgaacatccctacaatatctgaaattgaatgtttgccatttcttcttctttctcctcacacaacctactctgatgttcatgattactggagcccccaggttctaaaaagtgttgaattagcaagtgaacaaataaaatgagacccaaagaaactgtgatcttagcatcctgttttctgggtgaggttgagggtccttggcctctcttgctggtggagatgggctttatgactttggggaagtcaacttgacttcctgggtgttggtcttctcttctacaaaatgacaagcttgaagggagaatctgaaagaatctgtgtatccgttctcagattttctttttttttctttttttttttttttttttttttgagatggagtctcgctctgtcgcccaggctggagtgcagtgatgcgatctcggctcactgcaagctctgcctccggggttcatgctattctcctgcctcagcctcccgagtagctggcactacaggcgtctgccaccacacctggctaattttttttttttgtatttttagtagagacggggtttctttgtgttagccaggatggtctccatctcctgacctcgtgatctgcctgcctcggcctcccaaagtgctgggattacaggcatgagccaccgtgcctggccagtctcagattttcatgatagccctctgaactctccttggcttcttgcctttggctgttttctcaatgcatatattttcctgggggacaaatctaagttttcatctgatgctctgccttcagaggggaaccattccttaatgacctatttaattgtattatcattgttgtttaattcatcacatatttactgagcttcttttgttggtggtggtgccatcagacacagtggtccaggagctgcaatgcgttgctgatgaggatggtcacacatagctctgccctcatggagcgtcccagggtgaaatgagacctcccctgagaaccgactcccagggtaggggaaatcagtctgcaggcaaagaggaattcaaatttagcctgaagcacaggttttctgtgcttctaggcaccggctgcattccaaccgtagtgccataaaaatacaggaaggaagggaaacgtgttcacaggttggttagagatgtggaaaccaacaatcagctctctcttatccgtaagaaactagaatctactgctggcttcagtccctcagacctgctgctcaacagagtgccctttcaaacctgggttagactctgtgctaatggcttttttcatgaacctcagacagccggaaagtatattctttgaggattatgatcgactaggatgctcgggaatctttaaagagaagcactatcttggctatatttgccctcagttgttttaaggccagtgaggagactgagcatttcagaggtgaagcatttagaggatggcctctgaaagcatacggctcagtaaacaactgacccatcctttgtcaccgtttttgtccagcggctgtcaccataggggctcctctggtgtggaggagagagaattagaggcagcaggcctgggttctaggtctgcctcattgtgaaccagcttcaggaccttgggtgagtcacttttctgccctggcccctggcttcctcttctataaactgaaggtgttggcttagcaggattttaaagtttcttccaccttaaaaactctgattcctgcacttgcattcaaagaaatgactctattactcatttgaatagtttcagaatcactgtatagtcaactctggactagaaatgggggcctgcagttgaggacaggatggaaagaggtttggggttcagggtgggctgtgagggctaggattcttgattcctcatgatttgcaattggttgttggtgttaccatggaaggttctcaaccatggctgcttttaaaaattttgatgctcagaccacccctggagaccagtgaatttcaaatttctacaggccggcctggggaaatccatgttttttaactttcctaggtgattccggtatgtggccgggattgagaatcacagccatagatgcttatgtaaagctgtgttcagtgttacaggcatctgttctgggtggaaagtgatagtggttggtcaaaaaaaaagcgtgcacacacacacacacacacacacacacacacatacacagagaacagctctaggttctggaagtgtgttgatttggtcaccacaagtgctggtggtgagtagttgccctgaggtttggagttccagttccctcctatctctgggtcagtggtttctcaacatctttgaagtagtgaaaccatctgtagttggttatttctgctcagaaactcacagtacaaagtggggggtggtgcaggggggtggagctggaatggattaaacaggcccttacaaatgcccacacttttttcatgaaactaagttagaggccttagccaactccagcataccttagtgtcagttctttggcattgccccggtggattctaggggctgtgaaggctgtaggggtgtgtgttactccctgctgctttggtgagagagtgtccctgtctttggctgagagcatcctgtcctgccacttcatcagcagtagcatctaaacagcccttgaagggaatcagtatctacagcctaagaaatctgatgggacacatctctctgcattaaaatattaacagaaaaggtcaaactgggaaggggcagctaagttggaatatctcattcaggtaaagggatgggcttgtggatccttaattggtgtgaaatgcgccctaggaggggagactatatcagtgctgaaagcccttgagggctttcacagatgaagggggatggtatgagaagctttacaaataacaaggtttgagatgcagttgtagacacatgccagatgtaggttgctattttctcagctcaatgaggaatctgtcaaggcactcttagaaatggaaaatatagttcctgccctcaggaactatagtgtcacgtgatagcagtgaagaccttctatgtcctggccacacagtgaggatcagaagacagagcatggagagtggaatgggacacatggatcaaggaacgtggacctgagcaagcaaaagcaagtcactcgggtcccactatcacattgcatatcttctccttttttttttttttttctgagacggagtttcgctcttgttgcccaggctggagtgcagtggtgcgatctcagctcactacaacctccacctcccaggttcaagcgattctcgtgcctcagactcccaagtagctggtattacaggcgcctgccaccacacctggctaatttttagtagagatggggtttcactatgttggccagattggtcttgaactcctgacttcaggtgatctgcccacctcagcctcccagagtgctggggttacaggcatgagccacagcaccagcctcttctcctttctaacgtgatgtcagtgtctctgggaagcagccttagttggcacctcactggcagcaagaatgacttcatgttcttgctcccatgaaaattctctgctttcaggaatacactttcctctaggttttttctttgtctgcaagtgggggggtgttctttgccagatccctgctttgatgattaccatctgcccacctgagtttcctgcatagtttcagttggaaactcttttctctttggaccctaagataccgtgtaataggattgttcttggtttcagtaggcacctggcaccctctcagctgtggctgcatttcaggtatggatgggagtgattatctgtgcatcagaaaactcaagattgtcatgtgagcaagttgtgtgatcatcagtaaatgcagagctggctttgttaggccctggttgtggccaaggctttcctttcccggcgggtgattattccagatttcatggtcactagctgagtgtaatcaggagcagataagaaagccctgtatagagcaaagtatgcatttcttaaggtggtgggggaggtggcagaggcattatatagacgtgtgtgtttgtgcatgtgtttaaaaaaagacttatattttctgggcagcagaacttaagtttccagtaaacatctcctccctttttactttaccttttaattttgtgtttatggtctctgtgctttgaaattgtttttgctgtgatgccagccctgcctgaaatgggtggagcaagccaagccctttggaagccatggtttagatcagagttcttgtactgacatggcccagctgattgacagctcagatgtgatcactccgtctcaactagaagaataaaaataaaaaccttgagctggagcggagaggggtcacacatttgttagtttatcccctactctcacctttatcgcaggaggagtgataaagtgctgctgtgtgtaattctggtctggggttggttttctgtagtcccaaacctgggactaattctccctggagcccgtggcccagaagatgggtgcacagtagggttacttgatgctaaacggctttcccgatagacttgggatctcactgttcttgtcttagctttacttgttgggttggaggaggtgaggtgggtgggcaggggcctagggaagcccactatagaaacactgggacagagaatccagcccaggctaggtgagagcatctgccagtgtgaaaacacgtggaagcgggggaggcaggcgagaaaagctgtgggagaaaacctcacaaatgcagcaaagctgcccagggcccaagcggtggggcggtagcgagggaaacacagtggtgtttggctgctgcttcacaccacttttaattcagcgctgctaggaaggctatttcagaatgctcccgagtgggagggggcagctgctctagggtgggaaggggatgctaaggccgggtgcggtggctcacgcctgtaatcccagcactttgggagccgaggtgggcgaatcacgaggtcaggagttcgagaccagcccgaccaatatggtgaaaccctgcctctactaaaaatacaaaaatgagccaggtgtggtggcgggtgcctgtagtcccagctactcaggaggctgaggcaggagaatcacttgaacccaggaggcagaggttgcagtgagctgagatcacgccactgcacttgagcctgggcaacagagccagactctgtcttaaaaaaaagggggtgctggagagcatgtggggtggatagggctgactagagacctttgtcagggtgacctttctccagagagcccagtaggctcagaaggaaggtccctcagcaccctggcccacacagttccagggagaccccaaataaagcatttgcacaaacagtcctgagtggagcacacctagccgccttctcttgcaaagtgggcctttaaaaaaggggtgtatggctgcttagttctgaagaggccaggctaggagaccccagagggacacccagaaatcccagatatacctcctccatctgctctgcctgccagatgacccttgctactttactgttttttctttgagcctcttggtgatcttgaatagcagaaaaatgagccaaatttccttcaatctatgccagtcttcgtcctcagcctcccggtggggtgatgagtcacaccagtgggaaagtgcactgtatacttggtcatgtgcagagcaccttcccattggtttatctttacaactgccctgggtggagacatggcaaggtggtcctatccctattttgcaggtgatcaggcacaacttacagttagcgcaggaacagggactgaggccagccctcagttctttgacagagttctttgtctacactgtgttgcctcagaaaaaaatgcccatggggagtgtgtgtgcgtgggcatgtgtgctctcctcgtgtccctcagaaaagaatgaattcttttccaactgatgtcactgggaaagggggacaccactactttcctgcgtactgcactttacagtttacaaagcactttcccacacgtcatttcgtttcatctccctgacagtccctggaagtgggtgctagtctggatgagcaggcgcagacttggagaggctgagggacttggcccagggcatatagctaggaagcggccaggcagtaagtgggtagcaccactgcatgttgggggtggggaagcatgagctggatggagcattcggtggtctaaccagtggccagcagtagtgttggggtttgctgccctcacctctgaagccacacaggctcctgcttcctgaggtcaccctctcctggagggctgcccccgcatgggagtgtggacaagtgtgcacgagggggaggcacacccaggccgagtggaacaccaccctaagggggtggtgacaggtggcactgggagtggctggagtcggggttcaccttactcagggtcagggcttcccattttgcaggactgagaggtggactctgaaggaatgcagtgcttagaatcttggtgcctctcctggggtggtgggaagagcagggagtctcgagtccgattttgccaaaaatcccaactttcctgctgagtagctcatgagacaggcatttcacctctctgaacttcaacttgggggtactcagatttccttcagaggctgtgaaagagtcccctgccacaagttactcctctgttcagaagtgacttgactgatcatctagcccaaccccatcattgacagctgggggaaactgagctcctgagcggggcagtgacttgcgcaagtcatttgttgggaagaatggggcaggatgatgatgatgtccacttcttggggacgatggggcagggtggtaaacacttctcaatgcttgcttatgggctctgatgtgaaccactcactataggctgaatcctggttttccaagtgtttagaggctgagctgttgtcccctgggattttggaaggtagactcacatttcactgaaagccctagatgcttctccttactgcagttcccctccccagcactcccatctccctgttttctggggatttaaatcagctttgacttgggtctgaaagtaacccgtgacagcagtaagcctctcgatctgttgtttgcagtgtttcagctaaaatattataaacagaccaccaaactgtgtttggtccaaggccaagcccctccctccctacttgaacacttgattacctgctgcagggttgcgtcttgagctccgaggaggaaactgtttatttcagggctgttagagtgcagtgcaggaatccaggagaatttattgtattgttaccatctggtttcatggagtctgtttcttttgattttaattgtgccctctggagagaaagatcctcgaaatggtggaaaaagaagataccaccttcctccctgccctgcccatgccctggcacacacattgctatggtgcatggtgggcatggctgaaccaagtccccttattctttgaacatctttgcgtattattcctgctcccccagccgtctccaggccccagtctcctctggagggatttcccagatggcttccaggccagagcctgacaggagagataggacctgcctccacggtaacaaatggctgaaggcggtttggggtgttgccagtagcctgcccttccgcagtggctaaggatccggtgttgcggtgatacatgatgtgacctcttcaaccagtgagtcactcacccccagataaccacccggtactttcaggggaaaccgttgtatcattgtggctgtggccatggtttctccaaaataaggtgtttttagaaatgaaagtacagggattggtttccttagattcattgtcatggattcatagttccccaacctttttcacgtaaagactcacctctgtttcctcttaaattgtacatttggtgtctgttttatatattaataataactgacactcttctaaagttttttggggaaagaaaacataagtttaccaagctctcaattctagaaggtaatagccttctagaattgtccatttgcataagcatttttatgcttattgctgtaatcagtgtgtcagtcaaacgggaaggaggaactacatcaggtatttagcacaaagggaatttaatacgggaccttggttacacaggtgataaagcagctgagaagccacaatgggaaggtgaggtgacccagaacttggaggaagccgctgcctttaggctggagggacaaagggaacaggtggtgttcccagagcccagggttggggtcaccagtgggcctgtctagagcagttgcagctgcttctaaaattgccgacccaaggtagaaaaggagagaggggagaaacactgtggcctctccctccctcctacccactacttgctgtgagagcctcctattatttaaaccctgctggaggcctcctgatctggagcctggaaagtcagggctcagccccagggaggacacagcagagcacaggaagatgagggatggatcagagggcaaactggacttggaccagcacagggtgcaagcctgatgctctaattttatattttatcagcattttcttatatgtggctttcataattacacatattttatcaagtagatgaaccgcatttaaccattccccagctgttaggtgaacactttaaattactataaatcagcagttctcaaagtgtggccctgggccagcagcgtcagcatcaccagggaacttactaggaatgcagagtctcaggccccgcccccaggcctcttggatcagaaaccctgagggcggtcccagcagtctgaattttgtacactctccgagggctgctgatgtgcatttgagcttgacaatcatgattataggcaatgatgcaccgtgtggaagctgggggcaggatactgaggagggtgctgggggtaggagtggtggagggagtttgtccaggggaatgtggtgtagcggaaaaggcacaggactggtagggctgtgcccctttaggcccaagcctgcccttgctcttaacctcttaatgggtttcttctttcttctgttaaacagctaaaaatatcaaatcatggggttgctgtgacggttaaatgtaataacaggcacgatgttccatatatgttgggtcttctggagctttggggaaggaggtgtggcaataacagccagcttctgcatcatggaaaatggcccccatgcccatccctgagttgtgtggtctgaaaatcaatgatgaacacttaggaggcttgtagcctgctttgagtcaacaggaagactggacttgagagtttggaatctatagtctaacttcccttcctcaccctgtctttgtaaatggtgctcatctaaccctacagttactatcttttcactcatgtctagccacttgttagaggggaaggaaccctggtgtcaggacaggactcctggctccctgagcttgctgtgtattccggggcatatccttaacctctctgagatgtacttttcttatctgtaaaacctctatgttgatgcaaatcaggtgcgatgatggacgcaaaaactgccttgaacaccttagcgggcctgtgaatataaagccttcaggatccacacctctgccagggcccacaccagcctcgccacctcggtgagcctctcattccactgccagtgcaggggtgcataatcaggatttgccagtggaggtaggaagggtggctggattgtgactgtcacgctcctggcatcagatgatactggtagcaagctagggtcgtctgtgcactttgctctctctcagtcttcccagcagccctgtcaagcggggagtctagcaagaagtggccaaggcgcagatcatttaagaggaaggatgtgagcaaactggatcccaaggggacagacagaggcccactttgcctcagagtccagagagctgctgctgctaagaagggaaagaggaactgggtcggggtgcctgctgacttgcagcgctgtgttggcatgcgaggtagcactggttgggaggcggttacctgaaggaagcaaaggcagctggtggttcctatcttcttgcctctggcagcacctaaaagaagcctcttgggccaatgagaggatggactgtcccccacctgcagagttctgtgaagtggtgcggacgtctttgttgatctcatttggtgcctccccctgttgatggctgaggaagccaaggctctgagaaggcacatggtttacccgaggggacacaggcaaggaatctgaacccggattgcattttctgttttagggctctttgtgtgaccacggtgcttcccaggcccacacttccagtgttccaggcccttgaccaccaatcctgtggaggggtcctcagggcaggcagtgggaccacctgaggcctgcgtggggtggcctgtggtgtgagggacccaggaagtcagcctgcacctcggcgagtcagaagatgtggccatccaccaaccatcagatgttcccctacgcttagggctgtgaccagaagtggcatcaagatgggaggcgaagcttctgggaccagagaaccagctgctcctgttcatcctgcttttgggtgaatagctgatgctctgggcccctcatcccaccatcccaccccgtggctcctcctgagcagggctgagggcatttacctggctgccttctaaagcagacttggcacgagacaatcttattcaaactctgctcaaaattgctaccctgaggagagggctgtgaccaggcaggacggggtgtgataacatggaacgcagggcctgctggagcaggccctgatgagtgtaaataactgtgttagaggcaggacctgagcttttcactccataaatatatattacttctaatgtggccagggccgagctgaagatcataattatgtgagatctgctttacaggcatttagggaaatgcgtggggctgcactgatgtaggcaaagatgtggccacatacatttaacgtgtctcagaggagcctttgctttaaccctttaatcagacccttccagggtgctcctgacttgatgttccagagcgtttggagtcaagagttgcactcttttttcttgcattaaatgcacttgagttttaacccagtctctgggcggatggcagggctgcatgagggggtctccgtggatgtggataagtccagagaagtcagctgagctgactgggcaggtcttgggtaagtcacgccacttccctgagcctcagtttctccagcagtaaaatgttacctgtctgttagggttgtaagattgagtcaacatatgtacaaggcattgcttagtgtttaccaccttgctgtgagctggtaaatggttggttggtcccttcctctccccttggtgttaagcatatcaaaagatggctgcgtgctcacctcccctgctttactgggtggacaaaggagctgtcacacagtgtggcagccttagaaaggttaaagaaggccagtgaagtcttctggctcatctggtcctgaggtgggtgagcattaaacccagatcctttttgtgtttcagtattggatcctttggccgtcatatctgagacccagggcctcagagtgtggggtcctaacctaatttggctttgggtgaactggccagcaaatggaaggatggctgtggaagtgtgtcttgagcctgtccttacacaggtgtggctgtcatcaaggccatcttcatgggcacgtgacgagtacagtcacatagagttcatgctcaggagggccctatgcttggtttaatgctctgctgtcaccagcttgaaatcctttttttttttgttattgttgcccaagctggagtgcaatggctcaatatcggctctctgtaacctctgcctgcgggttcaagtgattctcctgcttcagcctcccgagtagctgggattacaggcacctgccaccacacccagctaatttttgtatttcttttagtagacgtggggtttcaccatgttggcgaggctggtctcgaactcctgacctcaggtgatccagccttgggctcccaaagtgctgggattacaggtgtaaaccactgcatccggcccatcttgaaattcttaataattttctctttgacctagtgttttggagcatgagcatggatagaggagatgtgggcagcatgtgcccattgagccttctgccccattcacatgtagcatttgagcacagacttctgccggacctacaatgtgggggagttgagtgagagtcaaagtgagtgtgagatgtcacatctgcgactgagtagcaggggccctgacagtcctgatgctttccatctaactggaacttgtcttggttgtagaaagaaggcgatgacattctaagaaacatcaacgaccaaagaaccccatcatatcctttattactcacgtcacttccctgacaccaaccacttatattgaaaatgatgacggaagaagggaaaggaaagatagggcacccatattgccttttcctttcagatcttccttactcctcaggcagcataaagagtgaggtagaatggacacatagcgagaagtgaagtaaaaacgattgagttagctttatggatgtttctctggttctggtacatcacaaaatgcacatccaagtcctaaaatacaattcatgtaatgttggtgattccacatactagttaaaggctttttatatttgcagttaaaactggcatcacacaatataaataggagtggtaaaattcatgctaattcatgtaatttaaaattttaatgttgctttacttagaataatattaaatagcaaattaaaaataccatgacacatcaagagagagactgtggaggaaagagaaaaagctttctattttagtaccatgattgatactttttttttttttgccttttgcacaaagggttccatattttcattttgcactgggccccacaaattatgcagccaaccctgactggcatcctggggctggaggtctcaggctggtcttgcacgtgcagcctctagatccctggtctgctcacattgtctcctgggttgcggagctaagaagcatcatataggcaagtgagcatgtgtgcttgctctgaagattccaagcttccaggtggtggtggctctgttgatagagataaaaagttgaggaatttcagaggctacaaacatactcttgttgaaggtgctttgggggtctcctgagcatttacttttgtgaatttttgggcagcctagtatagaggtgatccagcagtaagctgagagagaggccctagtttgactcttaactcaggcatggtctccttgggtgagtcatttcttcatcaggcagtcctcagtcttttggttgcagtgtagttgttaaaaatgtgggtacttggaggctgaattcttgggtcaaatcttatctccatctctctgtcctttttttgtggttttttttgtttgtttgttttttgtttttgtaggggacaggttcttcctccaccactcaggctggaaggcagtggtatgatattggcacactgcagccttgacctcccagctcaagcgatcttcccacctcagcctcctgagtagcttgggactacaggcacacatctctatgctgggctaattttcatgttttttttgttgttgttttttgttgttgttttttgtagaaacagagtttcactatgttgccccaggctagtctcaaacttgtgagctcaggctatctgcctgcctcagcctcccaaagtgccgggattacaggtgtgagccactgcgcccggccttatctccatctcttaactagttgtttgatgttgggcaggttgttcaagcctcctggagccttggtttacccatctataaaatgggtataatggtaattatcttatagcatggtcatgagcgtgaaatgagagcagggggaggagtaatcattgtgtctggtccatgggactgaatcaatgctagcaatggtcatgatggtgaagaatgaggggaggaggaagaaacaattcctgtgggtgctaggaccaaaagtagtatcctctaggaatcctggccttcaaggtctaacttccaagattctgtgagtacgattctagggagcctctgcctcagacttctaagtagttcttcaggctgtgctctagaagttactggaatgaaagaaaaattgtagtgtttgaaggtcttcaaggatcctggtcctctcacactgtcactcttagtcacatgacctttgactgtccattccctactaagccttggtttacgcatctgtcaaatggagcattcgtgggtgtgcctgccttagaggatgagacccagctgagatgacatatggagaaatcgtttataaacttaagtactggtgttaggaagagctaacacggtgagtcttcagtgtttctttaagtgctgctcactactgtcctgagagactccaagaagcagttactttgtttgggcctcagttcatcatctgtgagatgagaggattgggctttgtgcctaaactgcccccccaccccaccacccaagacagattaaaaaagaaggaaggagggagggagggagggagggagggagagagcgagcgagcaagcaagcaagcaagccagcaggatttggaatcgtcccctaattggaaccacaatcgcaggtttcagggactcaggaaagggtgcagcccagcttgtggttgagaaatgaatgtcagatgttaggaagaaaaaggcctatctcaacatagcaggggtttcttactgcccctgcctcctcagccccggtagcctgtcactccctggcgaacagcttggcagcacagaggcaaaccacagagtacatttgaggcccagatctgcttatttcgagggtggggccgcgtttttctcctgccacagtgagctaattaaagaaaacaagcttcgggagttgggagagaactgtccacaggacacttggggaggcttgctttggttgtggaggcctccacagcccccggaaggcaggtggaagtgggcatggagggtcctacgcatccccagcgggggtctgagggcccactgttgctcagctgggggatttggggacggtgggagggcatacatggatgggagggtggactccgttcctgagggggccagtgtggaggagggtcaggcagcccatggagatgggacagtgttctgaaatgcttcacaaatgtggacttttgccccaaactgtggacagagcgtatgtcctgagcgaggatcaactctgtgagtacccatgataattctcctttctgtggttgccgccctgttgattcatgtgtcagccttagagaaagtggctgtgacttctgcattcctgggaatacactgacatgagaagaagtagccgctcttgttcacagtcacagggctggaaagtgggataaggactaaggacttctgtctctggattcagcatgctgattatggggaaaagcagacatcaattcctcatgtcttgtaagcatcactgtcctccaaagttggagcccagctcagacagctgcatagtattttatagagaaggtgtgttgttgaaatgttgattatgcaaattgaattgtgttttaagactactgggaaaaccatttaaaggaatcctgttgtaagtcattttgaaaaatggagaattacaccacctccccaaggattttctgttttggtaaatttcatgtggcaagattacttgaagaagggttccagtgttttgctagcttataatggttactgcataaggaaggtttactcgccagaggtccgcatacattggagaactgggggaatatgtaatacttgtgcagaaatgttttgattcatgtactcagaagatgggatctggatgacacctccagcctattgattcccaagtaaggtgtgatgacaccaccaccagcgaggtgtgctatgaggaatttttgttgatgatgaaaagtgaatgctaactgattgcacaccacgtgccccataccttacatagattatcttatttaattgttgctaataatagtactacagtctgtgaatgatttacttagcaattaattcaaaagcatattccactctacaatggaatattttttgagccaagaaatgaagtacgtggccgggcgcagtggcttgcgcctgtaatcccagcactttgggagaccaaggtgggtgggtcatttgaggtcaggagttcaagaccatcctgaccaacatggtgaaaccccatctctactaaaaatacaaaattagccgggcatggtgccacatgcctgtaatcccagctacttgggaggctgaggcaggagaattgcttgaacccaggaggcagaggttgcagtgagccgagatcgcacccttgcactccagcctgggcaacaagagcgaaactccatctaaaaaaaaaaaaaaaaaaaaggaatgaagtatgtgccacaacatgggtgaatcttgaaaacattgtgctgagttgaagaattcagacatcaaaagccacatatcacatgattccattcccatgcagtatccccataggcaaattcacagagacagaaagcagattagtagttgccagggatggaggagaggggaatggggagtgactgcttcatggatacagggtttccttgagggatgttctggaacaaaatagttgcggtggttgtacaatattgtgaatgaactcaatgccaccaaattatacacattaaaatggctaacatggtagatttttgctgcatgtattaatatattaatgtattaataaatgtattaattacaatattaatatattgtgatatactgtgatatattgtgataaatatatcaatatattgtgataaacatataaattgattttaatatatattaaaatcaaatgtattcctctaatggtgtccatgtcactgacttagtttctgataggtttgtattgggtaggaaagaaaggaatgggacatttacgtgtacactgaggcagaagaaagaatgggactttccaatccaggctctacctttatgaggaaccagagacccagagagtgctagtgacttgctcaagggcacagagcagcgtaccagagttgagctttggcttctagcctcctcactttctattggggaagtcacagtggaaaagggggttttggctcctttatgtctttgggtatgttctgggtcactgaggatcagctctattccacctggcattttgtgctttccatgggtgctcaggaaactgtctgtctcaccctgaggtgaggctcaggaggctctggggctttgtagtagaaatagaaatatcccaagtcctgggttgtgtccttgtggatgtgtctagaacaattcctgttgtgctactcgctttgggcagttagcgaaagggactaattgtgtgcaaatacatacgtttggtgtttgttgggagacttgccatgtgacactgcttcttcttttcttctctttttgactatgaacacctgacactacaggaaataagaaactttccagtacctaatttatgcttactctactttcaaaccctgttggccccagcacagggtaaatgaaactgtagcttatagtaatatttacgtatgggagtcaatgagctgtttaaatacttggatgtcagaaaaaggtttcaaatttagcaagccccctgactctcccaccctctggcatgtactgggtaggcctgcctgctctctgaggtcgagctcttgtatcctgtcctggtcggtgccagtatagcaatgatgatgacagtgatgatgatgccactggaacaggctgagctgtaattgaattaaatatctgtgtaatccctaggagaagctgaataaggtttgaggatcttggaagttcagttatactctcagtaactgaggtgagatccgtaggcaaggaatgacaagatcgagattgattagctacatgaccttaggaaagtgacctaaaggttgttcacattcagagtcctcatctttgaatgtgaatgatatttctggcctctcctatcttatggagttggtgtaagcatctgcatgagatgatggacgttaaagtgctttgttagctgttgagactcttactgaaatgaaacccaaggatgggtgccactgaaagaaacaagaatgaatgcaaactagtttgtgttgggagttgtacttgacacagctgaatttgcctttgtctttaggagagccttagctgtgggaagcagggcttggaatgcgctgatatttatttcttccatcaaatcggattatgaggcacctgatctgtttaaggctgtgtgagtagaaccaggtcctgccttccggaagttcatggttaaattgtgttttcatgggtcacctggaaggcgagcttgttcagaatgaggataattgacccagtgaatccttcctgcctcgaggcccaccatgttattcagatcagtcttgggggaaatgctgtgaaagtgtgtgtgtgtgtgtgtgtgcggtgtgtgtgtgcatgctcgcgtgcatgagtttgtgttgagagaaagaaaaaagccaggagagtaggatgagtcagatttaaccactgttttttcccttttgaaacttgttatgttcatacacatacagcagtcatgcacttgctcagaaatgtgtgaaaaccacttaaaatgtgtgaaatgcagccctttagaaagtgtgccttccaccacattcttttgagcagtggagtggatttgtgagtgttcatatctgtcctcatctgtgggaattgtatgtccaaggtgctaattcagggccatactgggatgacctgtgtgtatagacttgtcctgggtgagatgggagcaagaccatccaatgtatgatggggaattctgttaaacaggtagaattctgaacctcttggtggtcctggctggtcagttgcagggagtgacgttgaatggactgggaagatctggatataccatgtttctgtaggcatgatacgtggtcccttagcttggtatttaaagttctttggaagtgaccgctttctggatttacctctgtgcagcccctctgctcctcccaggtgaggctcatcatagctcctcttcaatgtgctttgtccacaactgctgccatgttttagctccccattacgtttcctgggatgctctcctagactcctctgtacctttcttctttcaaacccaaaacaggtcccatctccttagtcttaactgtctatgaatggtctgttgcctcacttcccagctctggtatgtagtacgtgctcagtacacatttttgaatgcattaatttggctcttttctgtgaaggcagcttgtctgtgtgtcattcatctgcccaaatttgattgtcaacttcctttgtatggagctgtactgttctttttgttgtttttcttaactccttgcccctgcctcccatcaccccagtggaagagttatagtcaaggtagtgtagtcaaggtcgtgcaaaagctacacacttgaacctgttccgtgtggtttcacacaaggcacatggcctccttgggactcacttcacatcactcgacaaggggatagcaggacccaccttgactgtattgaagactgcatgatgatcaggagagagtgagggatgagaaagagtttggaaaacagcagaacacgatgcaaacatgagttattcatggttttgtgtccaggctaactgtgccctgacattaaggctgggtgggtctggcccagggcttctggggtaggcgctgtgctggtgtgtgctactgacctggagtccaggatccctgagtcccactcaccctccctgggctgcagtttcctcagcccagctaccctttccagctgtgactgctggttgtggagctgaatgtgtgtggggtgtgggcctgtgtgtggactccccacccctgtgcggttttcctaagcacatagcacaacaaggagctggaacagagctgcaacaatgaggagggtttcctccaactgtcagtgcttctggatccaccgtttcggctttgacattaccgtgagtgaccaccctggacctctttctttgtgccaaactcgttgctggattgccataaacacttacttggattgattagagaggctatttgccgtattgaaggtggcagaattatttcaccttttccagaggtgttgacgttcaagggtagttggtggtgactgtacagaagggagacaggaagcctggaggaaggaaaggggtgcgtagccgagaaagtgcacaacgggccctatttttaaaagtgcctgcctctgctggttttgttgtggcagcgctcaaaggcaggaagacagataagatcggatttcaggattttcgtctgccccccatctccgcccccaacttttgacaaccaagaacttttccccaccaggagtgggtatatttcaacttctgtaatccctgcgtctcgcacaatgcttggtattacaaggtgctcactgagtgtttgaatgaatgaatgccttcccagttctcatcacagctatagggtgtcactgtatacatcaagtcatggttagccgcaggtttgatcggggaagagacactaatcaatgtatctgattctagaagaagatggagcttctaggaagggcctgccctcaggctgtcctctgtgttccccggcattctgcattttgcagtcacccctcattatccctgagtccaggaacacctgagattggaaaggattccagccccatagggcctttatcgtggcccccagtaagtgataaatattcgtactaatttggggcagtgtcctttttccagctgttttcccatgagtgccctctgttccgtcaggtggccgaagacggataactttggcaaagggcttggcacaaatggccaagtttacactggatcactatactccgtgttatcttgtttccccgatggtcattgccacacaagaaagtacttcctctgtgggctttgcccaccctcttctcttgacagagacctctgggcctagataaatgtataaactgcattgcaggaatgaagccgtttccattaagaactggggtctatgtcctgggatccagttcttctcccccttttagtactgaaagctgcttcccatctgaaagctgtctggggacagacaccgtgcagctgcgtgcagacttctttcagagtttgatcttgcaggcttcccagtggctctgctcttccttgtctgcttcctgggggtctctcagtatcaaagccacctgtggctccatctcacctccctgaacaggaggcactgtttgtcaggaggccttgccacctttggccctttctttccaaagaaagatccctggcctggagtttttgtctcagctctgttgtgtgaccttaggcaagtcagttgacttctctgagcctcagtttactccttagtaaacaaaaaggttggatgaggcgctctccaaagttcttgccctctgtgtccttcctctgcgttctacagggagggagtagctgcctctgtttggtggtggggactcaggcaggatgggtagggaggggtaggggaacaagatcatggcgcacctccacggccacagtggaaaccttgaaccttgagctgtatgcggtgagtccaggatgctgagaagatgccgggctgttgggtaagcagagcccctacgggaagcaaagagtattattcagccctgtggaatgctgaggcagggctgagcttgggcagggtggctgagagaattgtggctctagctgtgggcagaaattcatggccttgaagaatggctactgtatataccagtgataaatattagtcactctggcagcagaatgagtttcctgtgctgcatttttggcacttccagaaaagggaaagcctttctctctgacagggcacaggagggagaaacaggaatgtgtctcttaccctgatgccctggctggagatcccgtggggttttcaacctgcctgaagcaacgcagggcctgctaatgcctcctgttgccctaggtcaggccagggcccattgttgacatctgtgctgtgctgcctctgaaggtcttgcttgagcatgtcctgaatggaaggcttcatctgcattcattccccggccctccctgccgtctgcacagcctcctccaggcctccccttcccagtgaaaagcaccaccatccagacctcaggaagcaatcattttagcctcttctccttctccctcaccatccaggacatcactgagccctgtcagttctgcccccagaatatctaagttcatccaatgccccatttccactgctgcttcctcacccaaatcaggatgtttctggccccgtctccctcctacctggtctccctgcctgtaccctcctctccactgggcccattctccaccggcagccagcatgatctctaagaaatgtacatctgtcatctgtcatatctgctgaaaattgttcagggcttcctgctgccttgagaatgagggtctgaatcccaaacaagggttcaaatctcaacctctcaggcctaccctgaccttacgtatctttcctcagggcctgtgcacatgctgttccttcttcctggaatgcttgtccccatagttttcagctggcgaatgtgagtcaggtctccccttaaatgtcatctaagagagccctttctaattcctccccttcatcttaactctatccccaatacactctctcacagagactgttcttttccttctgagaccctactccagcttgtagttctaaatctgtgattatgcactgtctgtcttcctcttgaggtcaggggccatttcttttgttctctgctatgctcaggacccagatcaaaggagctcagtaactatttacaggcgtacatcatatgtggaggacacttatgctgtgatggccccacacacagcttcctttggggtctgtcccctgctctccgttacccgcgtggtagccactgagcactggctcttcctggcttcactctctggcatcaaaacttatcagtcctacatctcagtcttttgcaaggtgacacttatctgattacctaattcacacgaaggtgttaatggtggtaatggcatagtatttattaccccaggggacccagaacggtggtatcaaaacatatcattccccagtggtttaaaactctggtagctttccagggagtccaagtggagtccagtctccttagctgagttcacagggccccgtctgcacgacttggcttctgtcggcttccctagccctgacttcccaagccttagtcatcaccctctctcccacccagggctcagcacagtacctggaacagtcaagccctcaataaatgtttactgagtgcattaaaaaaaaaaaaaagattttaatgagtcatgctttaactgaagattttagtgtagtcagtcattgggccttggatgccaaaggaatgacaaatggtgggaatttcaggcacagtgactgtgatagccccaaggaaaccaagagagaagtagctttatctgggtggaggggagtgggcctttcagagcctcgaaatcttcccacctgctgcgccactcccaccacataagcaccccacccttcttcccagggtgagatttctcagctctgctttctggggtgccagacaaggggagagccttgttgccatgccctcctgccctcctgccctcctgatgcagtctgtggtcacctgcaggcagagacagatgaagtccgtcattcggctgcgagtaatttctgatgggagaggggcttcccccggcccttcccgcctctctgagccttgccacggtcacttggtttgcccagcctaagtcactgcctgtcgctgtggttattgcatggacagggcctccctctgtccctccacttcccttccctgccccatactgttgccctcacccaccccaaagcctcacccttcccttccatagggatatggcctgatagaggaggagccatttgattttgactattgttgaaattgagtggggaattttgggtttgttttaggttttggaagggaggattatctgaggcttgaggcttctgtgatactgacatctggtgtggaaagtcatcctccctcacctaggtgactgggcctccaggtcatctccccgagcagcctccctggatctgctctcctctcccccccacccccccaccacctcccgcgctgtgcccagggtgatctttctaaaggacagatcttgcttcagcacctccctggttagaacccttccgtccagtggttcctagtgcttcggggataactcgccttgtcccttggggtctgcacagcgtcctccatctcctctcacttggccttgccctcgggggctccggtaagaagctttccaacctggcagctgcagactctgtgcggttgtattattgctgtaaatgggcagggattacgcatttgtggagtgactgatttcaagtacaactgccaccatgggagaggtctgtgaaaatcactggaattgaaaatgaccatgctttgcccaaaaaggttgagaatccccactctgatgatactagaagcctgcttgcctccccaccctgtgccaagccatttcttgcctccttgctttgcccataccagcctggaatgtcccaagcctattcaacttacttcctccaaaacgtagtcccatcttgatctccaggaagcagccttcagatgccccctcctcctggccactgcaaatgtgtccccccagctgctgagcatgcctaggtctgacacacaccacgatatgttgaaatcattggtttctgggttattcttctcacagtcccaggcagtgagccctcaaggacaggggctccatgggactggtctctgggtcggaggccaggacccaggtcactaagggcatgtcactcatctggaccacagctccctgccttgtggtgtggactctgttctctgcactgggctcgttctaaaacggagcatttggtccttgcagcctgccttgtggtttatgacttagtagattgaaaatgacagttgtgctctattttcatttggaaagaaaaaaaaaagtggaaaaccagagattgcactgatctggaggtagagagaaaactgtggagatcaaagaagatattatgtattatgaatgttacacagatcaaggcatgtttgaaataggcttaattttcctcaagttggcttttgtctcacaattgagttcttgttgacgaagaccagttattattcgtcttcgtgtctctggagtctagcacctagcacggtgcctgataaagcatggtcacttcacaaatacttgtcgaagaatgcatgggatgaatatgcatttgggtatttttaatgcttgatgattagaacattctcatggcttgttaacttgtaagacataattttcattgtaagttctttgtgtgtgcaaatgctttttgtgtggaatgcttgccatgcactgaaaaatgctttgtgatagcagttttgaaaaattgagtcattttgccctgattgaagctgggtgaccttgtgcaagtcactttaaccctctgggacttgtggccctcatctgtaaaatgggtagaaggtcagagtggacctcgtggcctgagaggctagtaccccatgctgcatgtaagtcttacatcctcctctttggtgattggatactgaccctctccccaggggttcctgcacagagctggaattctctctggtgtctttgcattctagtgggtggaatgccttgtttctcagtagcaatgagaaatgttaatgtgaggttatgaaagcaagccaagagccatggaataattaaaacacacacgcacacaaagaaggaaaagcgagagggggaaacacacttaatggacaagggatgagtaaaacccaatggactgagaaaaccccagagctgaacttcacatgaccccgcgtgctgcctgcagttgcgacacccgcgtgccccttacgctccgccggcctctcagtgatgtcagtgggccatgggccccacaggaagcaggggctgccatcagcctggtggagcgtgccagcccgctcctcctccacggcccacttcccacccacccgggtctccagataacatgaagccatagctcccaggctcgtcagcgggggaaaccaactcagtgcttctcagaaaatagaaccccagcccattagtgatgtccacgcaggcaagagatgaccaagaagaatgtttgccttttaggagttctctgcctgaaaccagcaggtttcctttagggatagggtgactgtgcttgctgaacacctctaggtcgtcagtgaatgaaataattcattctgtgcttgagtgtctaagacccagggggtttaggaataattaggatactggctgtacccttggagttctgtgctgcttgggggatacgactcaaactcacagacatctgtggctcaaatcaaggcatatagatgcagtgactcttggaacattcgagggagaatcaccacctctgctggtggaggaaaggccaggaactgcccacctagttttcccatgaccccagcctgtagcgggatatgtcagaagatttggatttagaggaacttgggtttgacaaaatagaagtgtatgtatataaacagagttgggagtgatgggggataggatgctgacagcaccttggtagtccctccccctacgtgacagtattgacttcatagtgttgttgtgaggcttgaagaagatacaagagggaagaggagcgttccttgccgtgcagatgcaaatgctcattgttacttgttctgcctctctgtgtctgtgacatccagccctgtgtgggctaccctggttgcaaagtgggcctcctgccgttgagcagctatggtccagtgggcaggtacaccacagtcatggaagcctagttaaatcattacataatagttagctctgtatgaccaatcttttctttaaagaaattcttccttttggaataatcgtagatacacagaaaaactgtacacagataatacagaaagttccagtgtacccctgacccagatgtccgtaatgttaacatcttgtattaccatggtacacatgtcaaaactcagaaacaacattggtacattactagtaacacaagtccagactttattcagtaaaccttttgaaaaataatagctttattggcatataattcatacaccataaatctgctcttttaagggatatgatttagtggtttttagtgtattaatggagttgtacaaccatcatcactatctaattttagaacattttcaacaccacaaaaagaaacctcatacccattaacagtcacttcctgcccatcccccttagccctggcaacttagtctactttctggttctctggatttgcctcttttggacatttcatgtagatgaaatcatacaatttgtggacttttgtgtttgacttctttcacttaacatattttcagggttcatccatttgtagcatgtgtcagtacttcattcctttttatggccaaatagtattccagtgtatggatataccacattttgtttgtcctttcttcagttgatagacatttgggttgttttcacttcttggctattgtaaataatgctgctacgaatatttgtgtacaagctttttttgtggaaatgtgttttcatttatcttgagtagatacctagaagtagaattatggggtcatttggtagctttgtttacctttttgagaaactgccaaattgttttccaaagtggttgtgtggttgtaccattttacagtctcaccaccaatgtatgagggttccagttctccccatccttgtcaacacttgttattgtctgttttattttagccattctagtggatgtgaggtggtatctcattatagttttgatttgcatttccctattggctaatgatattgatcatctctccttgtgctttttggcatttgtgttttttgtttgtttgtttttgagattgagtcttgctgggatgtccaggctggagtgcaatggtgccatctcggctcactgcagcctctgcttcctgggttcaagtgattctcctgcctcagcctcctgagtcactgggattacgggtgtgtgccaccacacctggctaatttttgtatttttagtagagacagggtttcaccatgatggccaggttggtcttgaactcctgacctcagatgatccacctgcctcagcctcccaaagtgttgggattacgggcatagccaccgcacctggccttccatttgtatatcttgtttggaggaacatctacaaatcctttagccatttctttttttttctttccttttttttttttgagacagagttttgctcttgttgcccaggctggagtgcaatggcgccatctcagctcactgcaacctccgccacctaggttcaagcaattctcctgccttagcctcccaagtagctgggattacaggcgcccgccaccactcctggctaattttttgtatttttttttttttttagtagagatgaggtttcaccgtgttggtcaagctggtcttgaactcctgacctcaggtgatccacacgccttggcctcccaaagtgctgggatgataggcgtgagccaccacacccggctagccatttctaattgggttgtctttctactgttgaattataagagttccttatatattctggatataaattcctttatcagatacatggtttgcaaatattttcttccattttatttctttcaattctgtgggttgttttttcactctcttgatggtgttttttgaagcacaaaagtttttaattctgatgaagctaaatttgttttactttcgtcacttttgctttttgtgttgtatctaagaaactgttgcttaatccagggtcacaaaaatttactcccttgcattcttctaagagttttataattttagctcttatatttaggtctttgatccatcttgacctgatttttgtataagatgtgaggtaggggttcaacttcattcttttgcatgtgaatatccagatgtccatgcactgtttgttgagaagaatgtgctttccccagtgaattgtcttggcacccttgtagaaaatcatttgactgtaaatgtaaaggtttctttttggactcttaagattctcttttattgatccatacatctatcctcatgacagtcttgactactatagctttgtagtattaatcaacttttaaaatatatatatatgtgtatatatatatatatatatttttttgagacagagtcttgctctgtcacccaggctggagtgcagtagtgcgatcttggctcactgcaaactctgcctcccgggttcacgtcattctcctgcctcagcagcctcccgagtagctgggactacaggcgcctgccaccacgcccggccaattttttttttgtatttttagtagagacgaggtttcaccgtgttagccaggatggtctcgatctcttgacctcgtgatccacccatgtgggcctcccaaagtgctgggattacaggcataagccactgcgcccggccttaaaatatatttttcaaaatctacattgttcaaaaaaagaatctgtggtaactctcagaaatccaataattacaatagtaaatacaagtaaagatagacaaggaaattaggggagaagacaagaaaataggaaaataagatgacataagagttaatgttagtacaacaactaatatgttgtaaggtttgtgagattgttggaagtagcctgcacatttggccttgagctttctagcagccaagggtaaaatggaaatgtgactaatgacaagattaacacagatgtctgaaagattgtttaaaaaaatgtccccacctccaatattttcagggactgaaatataagcatatttctcccatagatcctaggaacctgagcttctcacgcacaggatcatttcatttgtgttagttctttccctttagacgaatagctctttgaggacagtaactgtgtcttatttccctcacatctccctgtagtgcttaggacaaagcatgggagatgcttacaaaatcttgattgaattctttttcaaattgggaatgtttattacattctttggcagcatttctgccaccaggttgaggttagttgggaccaatttggcggtggagaagtggcaggggctgccctcctggatgcattttagaagtgttttcttgcatcatgcttcctgagtgctggctaagcagtggaaacattgggcaggtggggttgtgtgcccttgccctgagagatggccgtcactttggagtgaaggtaagcagcattgcttcactcatgtggaacccacccgccttcccacctcctcagcgctggagggtcctctctctcgcccactccctctgacatgcctctgagactgcctgcccgatggaaatatccagcatgtatgagggaggtcctggccaaaactgaacagcttctcatggaattgggcccctcatcacctacggttatgtgtggcgcacagatggccactctgcaaagaggcccacccagatagctccctcaccgggggcaaggaacaagccaccttcaactgattacatgtcatattgggtggacctcttcgtcccacacccaataaagggctttaccatttttcagtagcatcctttcttaagagaaacaaaaaatagatttgaataccagtctttaaaggggtagttgtcattacttcgcagttgacagatggggaaatggaggttcagggtgcgttacctgcctgctctaagtcatatggtgagtgggttgcgaagacctgactccaacccagagaatcttgactttgacttcatcctcccctccttccacctgccagtacccagtctttatctaaatttagggggcttgagaggccattctttctattttgggtaccttcaaacaggtaagcacagttttctttgaagttacctctgcctccatgtgggagagtatcaacaaacagttcccccttccccctccaaaagcactctctgcacagtcacccctaggccaggagcagccttgtaatatgccacacatgttgttactgcctgtggcttttcacacctcctgtctcaaatattggagcttttttggctacagccctgtgatgaaggcagtgtgggtgctgttgaccctatcttacccatatggacactacatcatctagggtcaccctgttggttgggatctggagtaagcccagaggccaggattctgacttctggtccagtgctctgccctaggccttgagcaaatgtgtatcaagttgcactgacaatctttgaattcctggaactcatgccatgagcacttccaggagcaccttagtgcttcattacaaagatgatgagacgtaggaaagtctttttttttttcccacggaagcagaatctcacccacacccgcagattttgttgtgtcccttcagcactgagctgtgttctcagaacagaacaggtagaatagagtcaaaatgcaaacagaatggcctccctccacagtctgctttgatggaaatgtgatgccaagcaaacagaaaagttgttttggctccatctctgaggtcatttagttgctatttccatctactttgaatccacatctgctgtgtgctcagagccgtgctggttgccaaagaatccaacaagaaaaaggcatggccccctttggggcgcttgggtcctctcgcagtgccccaagcccaggtgagagacatgccctctgggccgtgattccctcatcagtaaagcaaggaagataatgtctggttaaccaccctcctggagtcatggcaaggctgatacagattcagtggcattaactcatttgttcattcagcacattttactggcaacttatgctgtgctgggctctggatatagtagtgagcaaagaggaagcactcacaagggtaacactgcaaatgctaggagtcatgcatgagaagtccagggagcctgattccatttgagcaaggggtggtggtctgggaaggttcccccaaggaaaagacataggagccaagaccaaagggtgggtaggagtaatcagaagagcatgtctctcatctctggacttctgtagagagacttctgtaaccactgtaccctctggaagtgggtacagaagtccagagatgagagagatgtttaacaacagagagaaatccacccgaaggactttttacatctctctaacatctcctgttcagtttatctcagctggcctttgctgagcaccagttagttgccttgtgcatccttgggtgatggattatggagatggcagtggttgacactgtctgagagcagctcccagataaaccagcgcactgtggttgatgggctgcctccaggtagagagtgaggccctccaagcacatcctggccatccacatcttcacatttgcagtgcctagcacacagtggacaaaagggatatactggacacgttgtcctaggatgcagattcctaccaggccttcaaggcttgtagaaatcttccctaaaactgatcatgtggcctccggtaaggaatctaagcttttgaatcttggatccatctcgggcacagggataacggtggcgcccatctcacggggtgtgtggacgttgtctcaataatgactgacgtgctgagcaagtacctggctggagaagcgtgtggtaaaggggagcagctgtgattattatgggtatcattcctagtggttctgcaattagtcttgacagtaagtgctgcaggacttcagacaaggagaggctacaggtgtggaagtgctcctcaaagcctgtgggacctaaatgggcacagtgaaggagagtcttaggtggaagcaagaaaactgagcatcaggaagggagcaagacccttggtgatgggggtatctgttctgcatggaggatagatgacttctcagccattgggaaaccagctaaccagctttctgcttgatggttgtagtaaaatcccatgattagtgacaatggcatgccaggtttgaagagcaaaggtcaggaggtgagaaagcagataaatgcaatgtttatcttgaaagaagttgtcaactacttggaaatccccaagcttacttcctccaggaagccattctggactacttcacccagttctcatagctcccgggccctccatcttcccagcactgaaacacacactgaaaagggcatttttctaaatatgtctctgcctccccttgtggagggatgtggctccttgagatctggggtcacggctggcgtgtttcgtggagtagctagaaagagtaataatcctttttgaatgcacagcatttacagaggcctcacaggctgaaaatggtaattaggatacacaattgggtcttttgacctcaaatccaggcattttcccaccttgtgggcctcactcaaatgatgaccccaggttctgcctgtgatgaatgagcaggcatggttttgttctgttaggatatgacggtagaagagagctgtttgtcagaaccagcagtggcttcagatcttgaaagtccaactccttcattttacagaggaggaaacctgtgccccaaagcaggtccccccaagttccagcccagtgccaccccactgcacagagcagctgtctccttttgatcatgaggaagccaccaggtccctggtggagttcagcagatgtgccgggtgggcgactctggtgggtgtgaggatgtttcctttcctgctgggaagtcctccaagctcttgtgaaagagatgtggtttgtcgagcatggattttcaaactttctttatagagagctgttgttagcttaaaaatgcctggaaacatgatcaagtgtaatgttttaatgataacatagaagcacatagtactaagcacatgtaatgagaatgtacagaactctctagtaagagtctgaaatttggccgggtgcagtggctcatgcctgtaatcccagcactttgggaggccgaggcgggtggatcacctgaggtcaggagttcaagaccagcctggccaacgtggcaaaaccccgtctctgcccaaaatacaaaaattagccgggcgtggtgacgggtgcctgtaatcccagctactcaggaggctaagacaggagaattgcttgaaccttggaggtggaggttgcagtgggctgagatcgcaccgttgcattccagcctgggcaacagagtgagacaatgtctcaaaaaataaaaaagagagagtctgaaattcattctttcaacatgcttgtgttgggtgctgcctggcacagcaattggtgcccactaactcacagcgtcggggaagataggcacggaacaagtcatctggtgtggtccctgcagtgggggagcccagtgagggcctgtccagcccagctgagaggagactgagagaaggctaggtggcataagtaaagatatggatagcgctttcctcttcagagtgtttattaccagggttagataaagcagatctcatgtattttctgctactaagtagaagttcttgttttgtttgatttctggtgggctttgatattttccaaaaagataataactcattgtagagtaagatcaggactggggccagcagacttgggtccaaaggtgtgtcatttttataccagactagaatcgggtgaggggagatgtaaagagatcactattgtcacggaaggcgctggaaggagctctgcttagaaaaaatgcctttctctaggaggttttcatccagcatgggaacacaaaacaccagtttaaaatagctaggtaaggcttcacagtctctcaatgtgatgtgggtgtcctgagtcgtgaacatcccattgtgcaggataaaatgctggtttctgagctgtctttcaagacacaacccaaatgctgtctttgccatggtgccttccttgggaacccaagccaggtgaggtctgccttttctctgatgttgcctaacttttcctctttgtgtcccttgagctcagggacatgcatcccctgttgtacctagcacagaatcatgcacaagcaggtgcttgttaactgttggtgtgtaccaacaaacatttacggagcacctattagcaggagcacaggccaaggagctggatagatgagcgtggagtttgggggagaggtctgagctgagatatacatttgtgagtcatcattgtatggatgaggccgggctggggaggatatgagcgtagaatgagaaggtccagacctgcacctgaagaacagccccatttagggaatgcagggagagacagaggaaaagcaagatggtgcacagtgacattgaaggtgagtgacgagaccctgcagcaagaggaaaggagcagcagtgctagatgttgcagagaacccagaatggtaaggcctgaaaaccatgtgttttagattctgtaacctggaggccactaggtgaccttagcaagggcagtcatgatggagtgttggggctgaagcccattgcagggaggcccatagtcaatgggaggtgggcagtagacacagagagctgggttattcttgccacacagctgtgctggggccatggcgggggtgggggtgccacagagtgggagccagagagggacctgggtaagggctgaccgtgggtggggagcgcatggagtgctttcagaggccaagtgagtggaactgtctatgaagcagatggatggaaccctggctgaattatctcagacttgccaaagacattcataaaattcagacccgcacacactcgggaatgggaaaaatgaattattttgtaagaagcttatagtccaaaggtagaattgcccaagagagcttctgaaaggaaaaagtcatagcaagttgatatttttaaagtgaaataacataggttggatttttctagtaacttcaaggggtaaagactttgaattttttttttggagacagagtctcgctttgtcacccaagctggagtgcagtggtgcgatcacagctcactgcagccttgacctcccaggctcaagcaatcctcctgcctcagcccctcaggtagctgggattataggcacacgctaccacgcctggctattttttgtatattttgtggaggtggggtttcaccgtgttgcccaggctggtctcaaactcctgagctcaagcgatctgcccaccttggcctcccaaagtgctgggattaaaggcgtgagccactgtccctggccaagactctgggtttagtaagcctcttgcaactcactaggagtggatttctaggacctccccactttcttgcttgttgtttcttttgctagccgtaagtccctggagtacactgggtactttatgggaaaaagaggaacagtgtgggacagactttgccctgggctgcttaacgtgatgtggggaacagaggtgataagagcctgtggcagctcaggcagccctgccatgacctggagttggggaggggtatcaaggataacaagtcttatacacatgccatgctgtttctttggatcaatagatggataatttttaaaaccccctgtatgtatcaaactcactttggagatgtaaggcatggcctctgtcctggtgacagtatctgagtgggaggcctggtaaaatgtctgtgtttaggatgatgaacgccataatctaagactgctaagtgctgtggggtggtctagaagggcagatgggctagctgcgaggagggcagaggcactgtgcaatggtgttgcctgggaacactccgtggagagtgtgggaatctcaccctggccctaccaggtaagaaattgggcctgggaaattgggaagggaatttttcaagcttcatggctgctccaggacttgaactaagactttcctttagagcaagcttgtccaccctctggcccgtgggccgcatgtagcccaggagagctttgaatgcagcccaacacaaattcataaactttctgaaaacattgtaagattttttttttgcgattattttttagctcatcagctatcgttagttagcgtattttatgtgtggcccaagatgacgactcttccatcgtggcccagggaagccaaaacaccggacacccctgcttagagaaagtgcgttttctgttataaaaggaccttgaatccccatctcatatgttgggactttgtcttgcatgttttcaggcagggcatgattgtatctgtaacataataatatgtaagaatgtgtacttcttagcctttgcagagaggcgggaggcctgtttcctgcagcccccgccctgtcctggctgaggggtgggaggcagcttgctggccagccccgctgagtcaccctccggcgtggagcccagtggggatttccacgcggccccagtgttctcttctcctcgtttcctgttgggctgtgacgcaggctggctgccagcgggtgccggtgggcactcctgacacaggccactgccagccggccttgtgggtcctgagggcatcgtgggtggctctccccccacgagtgactgtgcctggcagggtgtgccccacatgtcagttgcactccgttctgggtgggcagctcccagaggccccggggagggctgcagatgggcggggggtggctgcctgggaggacgggaggttttgttgaagagagagcttgctcttggggcagtttgtactgggcgtttagggttataaaaacctagatttgctgaaaacggctctcttttatcttctgacaagaacatttgtgaagaaaacaaaacagaccttcagccatttagtctatacaccgagagaatggtttctacagtatgcctgatttctctgggtctttctaacacatccatgtatgtgcttgtcagcttctagtgcctccatttcttgatatgaggaaattttgcttaaaaaaaaatctctactgataggacctctgcatattcatgcatgtttttcctccagaactttgtgtcccaccactgtgctaggcagtttacaaatgccatctgatttcattcctgccactacagtctaaggctatattgtccgatacctatccaccaccctcatgtggctatttaaatgttgggtcattaaaattaaatacaattacaaatgctgtccctcagtcacaccagccgcatttcaagtgcacgggtaggctagtggccatcagatcagctcatatagagcagcacgttttcatcaccaccaaaaattctattgggtagcactggtctaaggtccggacatatgtccccattttgtagatgaggaagctgagtcctacagaggttaagttgaccacttagaagaatgaacagatgaaaccttttcattttacacatgaggaaactgaaggttatactcccctttccttcttagaaaagagaaattgatctgtaggcttcagggactcttcagttagcctgggggtactgtgcgggtcagctcttttgctgttccccccagaccctgtcagctgtgggtggtggctggtttctcttggtttcctcaccagagtttgggaatgagcaagtcaggactgctttccgtacggtaatcctttggcccatttcctatcgggggatttatggagctggtgatctcttgggttttttggccatttgttagagccaaaagaggtcacaggaaatgatatactagtttcattgcccaaaatactgaggtccagagaggtgaggggatgctgagggtcttgcatctagctaagagctgagctggctcttaaacttgttttcaagccaggacttacctgactttcttaggaaagtaatcactccatagacaaggataggtttttttcacagagcaatgatgttccctgtggtccctatgtagggtggtaaggaatagggctttgggatcctacagaccagggttcaaatcctggccccaccacttgtaagttatgggacttcagacaaggacttaaacattctaagtcctcagtttcttcatctgtaaaacagggataaaatatctcagtgaatttgttttaaatacttgcgtccgggcatggtggctcatgcctgtaatcccagtactttgggaggctgaggtgggaggatcgcttgaggccagaagtttgagaccagactggccagcataacaagaacataacaagatctcatctctacaaaaaattaaaaatattagctgggcatggtggtgtgagcctgtggtctcagctactcgggaggctgcagtgtaaggttgcttgagccaggagttaaagtctgcagtgaactcgccactgtactctagcctgggcaacagagtgagaccctgtctcaaaaaaaaaaaaaaaaaaaaaaatcagccaggcgcagtggctcacacctgtaatcccagcactttgggaggccgaggcgggtggatcacctgaggtcaggagtttgagaccagcctagctaaaacatggtgaaattccgtttctactgaaaatacaaaaaattagtcaggtgtggtggcacacgcccgtaatcccagctactcgggaggctaaggcaggagaatcgcttgaacccaggaggaggagtttgcagtgagccaagattgtgccatcgcactccagcttgggcaacaagagcaaaactccgtctcaaaaaaaaggaaaaaagaattctaacatgtttgagattgactgcaattcctagcatattacaagtgttagtaaatagtagccattaatattatgagcttatcatcaccttcagccagcattctaattttacagtatagaatccagtacataggaggcactcagatagacgggatgccccaaaattgggagacggacaaacttattttgaaatagtctttttttgacatttccaaagaatatactcaatgtttttctgcaaccctttgccttctttttaggtgaaggacctctacatttaaagcagtgggttcaactgctaacctgaaaagctataataaaacatcccagagtatccaaaaagcctggaaacaaagggaaaatagtgtgtcctgctttccaactttcggatatgctgtagaatagactgaaacaaatcactggaaaataggttgttgtcgattttatttagaagcttttgttcctttggattttcgtctcttatttttagacagagtctccctctgtcacccaggctggagtgccgtggtgcaatgatagcttactgcagcctcaaactcctgggctcaaatgatcctctagccttgacctcctgattagctgggactacagaagcaggccaccacgtctggctaatttttgtatttttctgttgagaagaggtcttgctatcatgggcaggctggtcttgaactcctggcctcaagtgatcctcccgcctcagcttcctgaagtggtaagattacaggcatatgccaccacacccagcttttttgttcctttgaaagaaggcattgctaatgattgccctgaggtgtctagatgacccggccagccatccacctctgcagtttacacagcttgttgatctccacagtgagaattaacttcacaacctgggtccaagaggctggaggattgtcagtctttagaaaaaaaaaaatctattatctttagagaagatggacttgttgaggaagaagagtagacaaatactttctggaaatattttcaaagggaattagaaaaagaaaaagattttggttgtcctttggtgaatgagaatattcatcagcagaatgcctcattaccacgtcacacagctgaccaaggcctcatctgagactgtgtttgaatagaaattaaacagggctgacagtgaagtttctgcttttaattagctttcaaaggtacacctctacctgtgatgttgaaacatcttgaaaaacctctctgctctgtgcctgaatgaggggcatctagagggcttggaagagaagatgtggcacagggcagccggggagaggctggtggccagaagatggacctgagcttggtgaatttacctggcatctgagcctggcctgaacaattcagaaacctcatttcatcagtcttggagtcagggctcctgtctcttagcaaaaagctaaagcatacatcaagcatatttattgacaagcgtaaccactgtgaggttataaccagggtgctctgtctgcttatgggcaccccacccgaccagccaaatggtcagagagctgggtgggtcggggaaagggagggagggagtcatgggaagcagttgtgttgaatggctacaggccctggtggctgggtgcatccccgtatgccatccaggcccacccactgctgggccggaccttcccctctggacagttcttgcttgggcactgactgggtttgctgctgaacctcctggcctggcagctctggttgctgatccacccgcttctttctttatagagattaagagcggctccagtgtgtgtacggagagcctctttgaagcgctgttgcctttctgtggctagatccacgatcttctctctgggatcaccccataggacatttgctttccaccttctccagtcccagtgaatgcatggacctctgtcctcattgttactggctgagccagatgtcagtcctgtgacctggcctcaggaccactcttgtagcccaccgtgggtggatgaagccggtgggaacagaatgataggagttaaccactttttaggcgttattgggccttttcactttaatagcttaacagagacatctgtgatggcttgcatccagagtgcgtggtgtttatttttgatttgaaatatgaaaagcatttttttaagacaactgactcctctgagtcatgcccaggggagcaaacggcctgaaatatgagcttgtgcttgctggaggaggatgacagaggagcctgctgctgagttcactggtgctggggttaggtcactgctgggctgaagcgcactgaccataagagcaacatgtgggcaagagccgcggcactggggtaatttattgccgccgctcgcttcaccaggaaccccacacgctgggttcccacaggatgcgacattcccacaggatgggacaactgcatggaaacccacactcgggcctgtgttgagcaaccacgtttgagtaagagttatcttatttggcagggtgggttaggtgtggggtatttgtcactgagaagcagaaactgtatgctcgacacacactccctgagtccttagggaattgcgtagtttttttcttttcttttctgggttcatcttaccagcagtcgtgtttgagaatgtgcacagctcaccttcgttcagccctttacagtttacctccatagccttctttgcgtcttggcaccatcttgcgaggtgtcaggccaggtgttaggatgctctgtttacagatgaggagattgaggcatgagttgtgattgctcacaattgcctcctgagtggtggggccatgctggggcactgtgcccagactctagacttccaggggtccgggacctcctgctgccagtctcctagcccgttaccacagctgtctgtttcttggcctctccctagatttctaatggaactcttggggtacagtctggaaataggtattttaaacatgctttgcagtgattgttacagatcttcatgttcaggtggcccaggggctgaccctgctccaacttccccctcagacattaaacctgtaccacccactgagatggttttgattttctattctgcgtttaaggcccatcttcaccccataaatgccagctccccaaggacagagccctttcctgtcttgtccacaccatgttccagggccctggacggtggttggcacacagtaggcccttggtaaatgtttgtcggatgagtatgtctcttcctcagctctgtggttagctgggagagctccgacagtagagtctggcaggtctggttcaagcatccctttggtgtaacatggtgtgaatggtggggcctcactgaattgtggagtggggggcagtgtgtctccctacgacctcctggtgaggagaagatagtcaccacccacacaggcacactcttgaatattccaggacgaggtgggcactcattagagggcagctcttacggccactgcctggtatgttttggcgtgagcagtagggtcatcgtggtggtcagtttttccactgccatcaaatgggatccatttagctctcagacagacaaggtatagggctggactctgtgccgtgggctaaataccggccacctcgagcctcaaatcaagcccagacaccggcataaacccaggtggcccaagccgaggtcgctccccagggccaggctcatgaatggataagtaaatatttaccctgtctgaggtcgaatgtgaactgtctaccaggtgttttgtttttctgtctcctccctctgtttctgcagtgcctccccctgtaaaaaaggaaaccaagaggctgacaggttaagtgacaggcttgacacagctagccatcagaacgtcctccagtcccatctgagtcctgttcctcctcaggcacctcctccaggaagcattcccagatgactggcccatcctgccctttccctcctctgagccgcaccctgcagacggccctctacctgtgaatccatacaggatgtaggcaaaggggaagaggtttgctcatcctctctccttcacccttgtgcatattaatactcacctggcaattagtcatatgcaactcttatattgaccttacatgttccgtgtcttctgtgcccgtctctggagttcctgaagatgaagggctgtgtctgctgcaccttcagactttttgaaattgattggttggtttgtacatccatttattcaccccacccctcatcctactgtacacgcttatggtcagtctattctgtgtcgggctcagggcctttctccccaaagtgcgttcatgtccaaggctagagtggatggctagaggccagaggacagcttaggctgaaagtggtagggagactatcaatgaagctggggggagctgagcttctgaaacttgggaataaattttcagccttgctaatgtgttcctctgaaaaaatatcttatcaggccctcagatatccaccagttctccctttccaacttgcagcctgcacccttggccaggaagttcataggcaacaaaatagaatccaccttccctatcactcaccccttttaaaatgtgactaactctgagctaaccaagccttggccagacgtggatatggttatgcacggactccgttttgtggtttgtcatttctgacttgctgggaaatcctttgttgggggtggggatgggaagtagagcatctctggggctggagtttttctaagatgtgtaagatttagaggctgtcatactgcaaacagggagagcgggctgtctgcttggcttcatggtcagtggagaacagcctggacttggagtaagaacagctaggttcagatccctgcttttactcctgaccacttagtaaccttggccgagtccctcaacctttttgcctcagcttccttatctgtaaaacatggggttcttgaaggattaaaagagctggtgtgtgtaaaacccaggaacatagttcctggtgtatagtgacttataatttcgaaaaccttaagattttattcataagattttttttttcaaggccaacttaagatttctaagagtttgtttttcaaagagctggggtcttgctttgtcgcccaggctggagtgcagtggtatgatcatagctcactgcagcctcaaacctctgggctcaagagatcgtcccacctcagactcctaagtagctgggactgcaggtgcacgccaccacacccagctagtttttaaatatattttttagtagagtgaacctcgccattttgccaagcctggtctggaactcctggcctcaagcgatcctcccacctctgcctccaaaagtgccaggattacaggcctgagccaccacgctcagccttctaaaagtattttggtgtgcaccattagcactgtgtcttaaaggcgatgtgcaccttgagcacagagtgttgagtgcgtggtggatggatgtcatttgcgttttacagatgcggcaacagaaactcaggcccagccacttacccgaggccacatagtcccaggtagagttggaatttggaataaagcctgctgactccaatcctagatgccttccacactcctgtccccctacctctacaccaggcgtccccaacccctgggacccctgggaagtgatgtgcacttagcacctcactatgggaaacataaagcaggaactaacaggactcctctctcaagaaggaatttcagtctacttggggaaagaataatagccaagcagtaactcaggtttgtttagccttctagagcagtgttgccggatatcactgtagtgtgagctacagtgtatggtagcccccacttgttcttggttttgccttatgaggtttcagtcagctacagtctggaaataggtgaatatagtacagtcagatgtgttgagagaaagagaccacatttatataacttttatgatagtatattgttataattgttaatttcattattagttattgttgttaatctcttactgtgcctaatttataaattaaactttgtcttgggtgtacatgcacaggaaaaaacacagtgtctatagagtttggtactgtctctggtttcaggcatccactggtggtcttggaacgtattcccctcggataattgcaattacttctaaaatctaaaatcttctggccatgttaaaatgtaaagagagggtgaaattaattttaaatactatatcttgtttaatacagtgtatcccaaaccatcatcactttagcatatactcaaatataaagattgttaacgagctatattacattcttctttatcatactgagtctgaagttgatgtgtcctttatacttgtggcacatctcagtttgcactgtccacatttcaagtgctgccatgtggctggtggccaccatattggacaccacagctacaggatttcttcgttaggtcagttgatgtcacctgcattttggagtggagtcattgagctcactggctgagttacacagctagtgaggagccgggtgggaccagagcttggtcttcttcccattaaggaagaagggaaacttgcatttgctgaatgtctactatgtcccaagtgctgtgctagatactctacctttgtcattccatttagttctcacagcagccttgcatggtggatgaatatcatgtgcattttacagatgaggcaacagaaactcagagaggcccagcaacttacccaaggccacgtagtcccaggtagagttagaatttggaatagggcctgctgactccggtactaggtgccttccactcacctgacctccttctcttacaccaggggtccccaaccccggggccgtggactgatacccgtgtgcggcctgttaggaaccgggtctcgtagtagtaggtgagtggtgggcaagtgagcattacggccagagctccgcctcctgtcagataagcggctgcattagattctcataggagcgtgaaccctattgtgaactgcatattggagggatctaggttgcacactccatatcagaatctaatgcctgatgatctgaggtggaacagtttcgtcctgaaacatcccccccaaccctcatctctggtgccaaaaagattggggaccactgccctacacagagaaagagaatttgcacgtagcaacttaggcaaagtattcaaggaaagtgccaggggacaggaaggacaccatgggctggtggcctgttcagtaacagcttcagggtatcagttcagaaggcctaggcctgctttggttggggtggtgtatgtgtaaaagcagcattctgtctaatcacaggttctgcctgaaaggcagacacttttaacccttcggtggacagggttggtgatagctagtggggggtatgaggtgggggtgaggaggtggtggtgggcagcaattgcagaggccagagatcttggctgtgttctacctgccacgctgggaatgctaagtacttctcaagccttcaagcaactgagactttctgctcggggaatccccaaggatttggggaggctggaattgagcaagctcttgaatgcatgcatggattcatgcagtcactcactccacaaatattcacgtgctttgggccagaatgatttcggcaggaatatcttgtcctacatgctattgccatgttctctgaggacccgcggcttcgcatgtgtaaatctccctccagagtactcggcagattcccgaagctgactgaggctcagggagtgtcagtcccttgccacaggtcacatagtactgaatggaagatatgggacctcagaaccaagaggctttgactcatttgtccctctttctgtctgttttgccatcagccaggagatagtcgttgagttgtttctatttgccaggcatcgagctgtgttctcgggtttcattgttgttgttttcattttgagtgtgtttgttttgttttacttttaggagcaatcacagtgctcctgttgctgaatggtggctgatgtctgttgcatgccaagcactgcgcagggtgctggtcacagtttgctccagggattcctcccagtcccgctgtaaagaggaggaaactgatgctcagagacttggacctttctgaacatcatgaagctagggatttcagtcccagcctctctctcgagagccctaacttagccactatacctcactgcctctctgtgaccagggttgagtcctggtcctcaaatgaagcccgatttgccagaaccttcttttgaggccttacctggtcttcagttttaccacgtgttaattgggggcagggcagccagtccatcctcttctgcagaaatcaccctgtccaggagatgggtgcttcttcaggacactacctggctaagaacactgcattaacaggagatagagatccagtgtgtgtgaaccttgtgaaaacatctctgtctgttcctccaatctcccccttctgtcttatcatgcagggcaagctcaggttgttgtcctgtctctgttgggaggacccttgagtggtatctcctatgcccaagcagacctgcagagaaccctgtccaaactgatggtcatctgagacatggaacttcatgataggaaggtgtcttggaggataactagcaagtctttcactttatagagggggaaactgagtcctcagcgatcagccacatagattctgtgttgtagagacctgaggatgtgtctcatctccttatctgaacagcaagttcccatgctgcgaacgtctcaccctgaccctcaccgtattttttaggaagtgaatggggctttgagaaggacaacctcactgttttgcccatttctgagatggaaaatcaaggaacattgccccatctccaccccgggaatctatatgcccctcccataggcaagatggaagctagaccagaatgtgcagcttgtgcttcttgcgggaatggtgaggacagatgagggcagggagacagcattcctaaacccagccttttgacccaagaggcagggactccaaggctgtagaatgggaggaattgtgggaggaaaagcactgggcagaaggtctcagtcaaatgcacctgcagttattagctatgtgacttgggcataatgccacctgtgagcccccattttcctcactaggacagtgaactcaccaataggtttgagttgttgccctcccagaactgttgcatgaattgaatgaggtgccttgcttaactgtactgaatactggggaagcctgcttaaatggatgacaggctttttatcattagcaagctgccgcactccccactcatcactccaaggcagaccattgcattttctttcattctgataaactccttgagttgaacagaaatcagactccccgtaacttctgctccacagtttaaaacagcccaccatgaagccttatgtccttcaggacattctgccctgttcacttggatttctctcctccctgcaaagcatcatcagcttcctcctctgacccatgttttgcacttccttgcttgtcactcctctttaaacacttgtccaaactgtttgtggcccgtcctgtattacgcccagggcagatgcagtagcccagcccaagcagcagagaccatggcctccctgatgtggggtctgtgcctcttctccaggcaagtggctgtgacagtctaactttatggaagggtgaactcaatgacattggctgaactgctggtgaacacgggaaaagcccttctggacctcttatctctctctcctggccagaggaaaaccatgtcccatttgtcctgtttgagcactatcaggcctatagccataatcttttacaccgtaacataactttgccaatgccaatattatatgccctttttttttttctagaaaaacttaattgggattttaaatgcatttgggggatgggctgcgtttctgtttgcctctaaaaacaatgagaaggcaaacaaagtatgatcctatcgccagaaaaatggagccaaatctgaaattaatttacaaagtcattagtattttccatttgtgacccccaaaatgaatgtaggtgtagttccttgcaattaactgcaaattaggaaagggttgggaggatgtttcagggaccaacacacagaactgtagcagaagcagatgggggaatggaaccaagaattgccttggttttcactcaaggccgtggtttgggagagtagtgccgactcaaatattccccagaagagagcactttttcaacagtctgaaaagtggcagggacctttggaatgatctgttttaaccttttcattttctgaatgaggcaactgagagattcaggaagggtaagcgacttgcctaaagtcacatagccaggaaggtcagaaccaggaccagagctctgcttctgactccctggccagtgctccagctgccactgcccccctctctcctgggtgcttgtctgcttgtgcctttaatgttcagcacttgagatattttcacgtttagcaccttcacgtttagcagtactcctcattagaggaaaatgggatgatgtgggcagagtcacccacagagtcactccaggtttcagatgtgctggtgcttaccgagtgccacagggagaaagtggtggtttctcccttcccttaagaaacctggttatttccaaggctcaacccctgcaacgccccaccaagccagtcacccaccactgcacattgagaatctgctgctctgtgaatgaaattggcctggggttaatgagtggtgaatgtgtgtcagtgtttggtatttgcagcaggagctcttctgcgattccctaagctcagatgaacggggcctttaagatgccatccagccatcggagagatgcaggaaaggccttttgaaatgctgtttcccctgacctatttgaggtgaggccctgtgatgtcatttccccagtggtgtgtgtgagagagcaagcagcactaagaaaagccactgctgagagttcacagtccttgcttcagtgttgtcttacgctcggggtgccttaaagggcttacagcgaccctacctccagcttctccagctccctttccttggcaaacacttgacccatcccagccccttgggctttctttcctcctcctctgctaccacatactgtgggtgttgggaaattactaaaggcgcgactctggctctcaaagactctgaagtccaggatcgagaagaactgtgtttacacggagttgtcaaggatcattctgccaatgataacctattatcgtgcaactctgtgccaggtcctgctctgggagctttatgtgtgctgttgcccctcacactcacggcagaggtgagacagaatgctgagagatttctgcagacaaggaatctgaggtttaaagaggcaatgtttgatgagccactgaggggtggggctgggattggaaccgaagctggctgcccttcagcccccagggtcctgctggggagatgtacccagggggtcctgtgctgggagagtggaagcaggggtgtcactgggggctttgtcctgggagctgggcaggtgctagggacagagctggcctggttttggagccacaggagagaagatggccgggaagagctgtgtttggaaggttcctttctgtgccaggggtcagcaatctgggttctagcactgagaggggcaaaacgtgggtttgtaggggagagagggtgacccccagtgagggtaagaaagataagctccagtgagctcttctcaccctgggtcccagcctgtaccaaaaatccaggggcagcccccgggcccagcctgcccccttcacagtcccctgactgcttgaggctgtgggccagtggctttgccccttggaagcttggtttcctcatctgggacagaaaggggtcaaaacaccctttttcattgttaagattagataatttgagagccaaaacttcttgcagggtgcctggtaccaagtaggccctctctaaataaataaatgatagttttcattttcccttccacttaattgtttttttttaaaaaaaacttttcttccctgtaataacaaatttcagaagacaagttaatacattgctgtgtatactctcaggccaagaatttcctcagtgtttacataccagagcagtactttgaactttgattttctcctctgcctctgtgctggttcagacaccctctctaagatgccagaagcattgccctgccttggcctgttggtggtggggtatgtgtgtgtgttttcatcgtattataaaaacgtgaaacatttgaattacgggcaagtggtattctaccagatttaataaacgttaatattttccatattcacatcaggtatttgtaacatctctttctttactaaaaataaaaaccttctgctgaagacctcctgttactccaaccccttcccccttcttctcgctcccgtttcacaggtgtttactctcttttaaattggtgtgtgtccttcccagctagaattttgtagtgtattatttgtaaagccaaataaccccactgcaatgtgtttgaaccaccaaagcaaatgatcaccttttgggaaaagaaggctgaatatccaaggccagatcagtgattcaagatcacagaacaaacctaactgctctcaaattgaaatctcaaaattataaattcattgcctttgacttaaaacttggaactttcaaccctgcataattgcagatacattaaagattgtgccatcttgagctcccagggtcatctgaacctttcatgtgaggaaacacatcccagagtcagtcattcttttttttttttttttcttttcgagttggagtcttgctctgtcacccaggctggagtgcagtggtgcaatctcggctcactgcaacctccgccttccggattcaagcaattctgcttcagcctcctgagtagctggtattacaggcgtgcaccaccacacctggctaatttttgtattttttagtagagacagggtttcgccatgttggccaggctggtctcgaactcctgacctcaggtgatctgcccacctcagcctcccaaagtactgggattataggcatgagccactgcacccggcccagagtcagttattcttagagcaggtgttttggcttttgtctttaatgcttccctccccactttaacataactgtaatatataattattgtggaaaatttagaacacatggagaagtaaagagtgaaattgctgactgccctattaccccaacctccaccctatagagatattttctccccatccccccaagggcagaggatggagatccctgggcttctccaggtggggagtggtaccatggtctcttcaggtttcgtagcagacaggccccattgaccataggatatgtgtccccaaggtggttagaggccatcacctgcctgaggtcagctcaatgggcagggctgggcatctcctggtggtctacccaccatgccagttcatcaggctggggtctgacctctttctggtgtctggtgctgatctaggcaaggtgacaagtgctcaacagaggagtcctggttccttcaaggaagctgggaagtgtaagacggagcaggctgcgtttgtggtttttgccaaggcttgacttttgaccacttttctgaaaaaggacaagggtgtttttttgttttgtcattttttttcccagtagatgttcctatttggttcacagatataaacacttgaaccaggtgatatcagcactgcaagttgatttagtaccacagccattttctgtgtaccaatatgaagctgttccttcataagttcttccttttcgcttttttaaactgaaattattttcattaggatcactaccttcccatgtgcattttaccacaaaatttggttctgattctgttggcttgcttgctgttagtactcatgttagcttctgccattctttccaccattgtcctgggtaaaattttgcatatctgagttgttggattctttcatcagtttttggttagtgactttcatggtctgcagttttagttgctttcagttttattttgtgttgaagttttttctatgaggtttgattttttcagggtcagtttttaaatgtagcaaggagtgtgctttttcagtttgcttattattttcaacaaatgtttttggtgggtaattttacctttgttgatcaccagctttgtttggggtgcatcatttctctcaagccgaattttctctggtaatctggccagaaggcccatagggtcagaatggcaggtcaaaatgtcttggtgctttcttgaagagtttgaaacaagcttgcaaagtactgtcctccctttggatttcttctgtctgggtgttgccagggctcttctgttagcgacagagaaaataggaggtactagaattcggacttctaggaagggctgtattgtccttatcatcagaatccctccctcccgtccctgtgacctcccaacttcacaaacatgtcttgcctgcaccctaggcaaacgtggaaaggcgcagctctggtacaccggaaagcatggtggatggggaggtaggagccccgtgccgggacatgtcttttctctttcttgaactcgtctccccacccgtccacagggttgctggccagagatctgtcagagtttctccgggcttctctttctctgggtggggatgtggactcttaggatgtcaggaagcaactgtaggaaaccccctgtgtgggtgaagcagaggcgtcgctcagggccctctgcctggttctgggctctgggaccctgctcccctcccctgaaccccccctcccccggccccaggatggagcttgcttgccatcgcagtggatttgcggaagagggttccagagtgtggggagagcgtgctggggaggggagctatttgttcctttccagtcatcgctgtactgagcggttccctgggacagttgaacccaggggaactgaattcatctgtgtaagtaaacatccatctccccttaaaggaaaagcccctgctcagcctctctgggcagctggaatgctgctctgtgggtctgggcatttgttccttctttctttcttcctttgatttcttgctgtctccttcaattaggcctgtgactgttttcacatggctatttgtatatacaagccatgccaggcatcataatttgtgtttgtctagatcaataagagcagctttaaccaaaaagtccagctgagaatttataaatacccctcacctcctcccctccctggaagatgtgaaaacaccatcccattaaccctccaaagcagttggttgacttgatcagggaagatatgaaatataatttctttgaatgtgctttctctttactcttttagtggaatttgatcagtgtttaaggaactgtagccgattcccagcccacttcaaagcaaaagcccttcactgtgcctatttgcaaaattacctttgagagactgaagtgtcggaaatgcatttagacacagattgtgccttatattagctctccgttgccccataaaatgggcttgggcatatctgaggcagctaccaaaggaaacttaaaaacagattctggcggcagcgattcttgtgttctgtgctcactgtggaaaagaagggggctagagggatttaagtttacgtggatcttgaggattttaagaaccagatttcttctctttgctcacattaggggaaaaaaaataaacctcagatgccccgtgatatctcgttgcgtcaggttttcctataaaatgtcaagacggcaatattaggtttcctggcttgcttttccccactgtgtctgctcttgccagaatttttattagggggaggggagcattctctacccctcctccctcaatgaaatcatttcttccctagcctttaaccctttaaagtttgggaagggaatactttgattttagggttaaatagaaaacttccttaatgactgtggctggaattaaggtgtacttaaagctgtagcagccctggtgggtcctgggctgactgggtgctagggtttggtatggaaagcagcttgcatcacctgcttttcttcccatgcctgtgccttccccaagctccccctcctaagccaggtacgattccagctatgttaaaaggccctgggaaatgttaactgatcaaaaatgctgggtaagtagaattattatttcaccctgaccaacttcagtcagattagcatatctgctgtcaccaggtatggcacaggcatgggtggaagctgtgcttggaaagtgaatgtgtttaggccaggtgtggtggttcatgcctgtaatcccagcactttgggaggccgaggtgggtggattacttgaggtcaggagttcaagaccagcctgaccaacatgacgaaaccccgtctctactaaaaaaaaatacagaattagccaggtgtggtggcacatgcctgtaatcctagctacttgggaggctgaggcaggagagtcacttgaatctgggaggcagaggttgcagtaaaccgagatggcaccattgcatcctagcctgggcaacaagagtgaaactctgtctcaaaaaaaaaaagagaaagaaaagtgaatgtgtttgctggaagctgtgcttgattaagtgaatgtgtttgatccaagagggcaggggattctggaagagacattaagtacagattgatgagtgtcttgtctcaccgcaaaaacctcctttctctcttccttcctagtccccactgaaaatggagtggtgatagcttagttctcactttggtttcaggcaagagaaatggtacccaggaggtagagttgagtagagactcctttagctctcttcttttttctaacttctctttattccaccgttctctctttacttctgcctaccttagcagcatgctgcagaataaactctgctaggaggaagtttgaaatctccaggctgagaaactatgcagagagcaaatgaccttctgagggctctgggtacagaatccttggtatgacaggtgggtctagagccggcagagactcaaggcagcctgacaggacagtgagagtgaaagggaacgctattaataatgacaccaggtcaacacatgcgaacccaactgtcctgaacaaacgggggtttgtggttgcgctacaaaacccaggcttcagtctcttcgagttctgttttgatttggaaggagtgacgccttcccctttggaagcttaggctagggttgcaagctgaggtgttcacagggacagacagagtgtgggaaatggggccaggtgtaaggaaacggagcagaacttggggttcattcatagtctaaagggggcattggcaagtcggcatcagacagtagcaacttgttgccagatcttctgagtttttttcaagagaagccaaaaatcaagatttacacacaaaatctcccagtttgtaaaagttggcaaccatttaaaaattttaaaaacgctctgcaggccaagcacaacatctgtgggcagtgggcagctgcctgtttttgacctccagcccagaccgatcaattgatggctgtcttctgggtctcccaattccggcaacgggaagtttcttaaggaagttgcctgggctgaccgcaagtgaggtggggaagtggaaagggagcttgacttggcttcgattgatcatttgcacaataaatatttattgagcacctgttatgttcaacgtactatctgtgttgtgccatgtttcctagtctacattttgggatgagctgtgtcttcctcatgcaggtggactctttatgccctgcacagggatggttccatgcttctccctgagattatggccaagatggatgcagtgggaggaacttcagtgggggaatgttggggaaagacctgggtccgattctcagaccctgtaaagttcattgtatttcagcttaacccagcagtagtccccaggatgagacagtcttcagctgaggaaagccctggggatttggaagctagagcagagagagtccagccagggacccttgtctggcagtccctgaaggctgtaccaggaccaggcggcaaaaatcacagaacagcctccattcagctccatacatggcagaactttctaacagagctctgtaccttgtggttgttggactagatgatctgtgagctgtttttcattacctggaaagtccgataccttgagtccaccccccatacacccattagactcctgagtcttaaatctgctctggttcatggcttacctcctgcagctgaacttggggttgagtgccccagaaaagccgatacaaactctaagttgaggccaactcagtttgcctggggatgaggtggggtggtatgggggaataaaggcttctctaatgctgtgaggtgtcattcatgttttccattctcctgctctccgaatttaaattagggtcaatcatacaaacctcacaggcttgttcagtcaacaaaggcacagagagcttaagtcacttgctcaaggccacgtagcgaggcagtgaagagctggggcctggaccagctcatctgtcatcccccgctcttttaccccctttcctaaactgttagattttaatttccttttggtatattcattcttttgtgtgtctcctccccacaccccccccaccattgtttctagaactgtcagtgttcaaatgtttaatagctaggttttttttttcccccgtacacttggccagaagtaggaattcatcaccatgtgtgaacatttactgtacctccatggtttgcgtggaattgtactagaaacactcaaccccggggctttgttggcaataaactaggtctttctgcagaacttttgaggacaaatcaccaatgggttggaaagcatttccttcaggaatggcgaaactctatttttcaccttgttaatgctgctcccacctttgtttctcccctagtgtcagtcttaagtgtgttaagtgcttttttctgctcagtgtcctagataagaggtttccaaatgatgtcccctgatctgtaccccacccccaattctcaggcttctggatagacagagaatggacatctggtttgttttggaatgacaggctagactagaggcgtccagaggcctggtaacggcagaggctgctggcatcttaagacattcaaaaaccactgtgctaagtaacagtggagatatattgatctcaacatttcaaggagaaaagagcttgtgaaataggcttgtgatgtttgtgataagggccctgtggggcagctggtgggcaccccatgtagagctggaacacagggacatgatcccatgtgcaggagacagctccagcctctgcatacccgtcggctcactcctgggttggaacatcctcctcattttctctggcatgtccttttgctcaatgaatcattcccggccaggccagacgtccttgctggagagccagctctccgtgcaccagccctgtgattctctaatgccagcttgaaattcggtgacccaccttgggatgctttgcctgtcaaggtttttcaatgatgaatagttgttatgagcatgtcagccagaatggtacttttcaagtcattcagtaatggatctgtatgattattttttgcacaaagaactaaatagctaagatactattgtggcagatatgccataagtaccttttcagtgaaatctttagtgtacatatttgtcacactgtattagaacatattaaggcagctcattaatgttttagtatttagagtttgtcatacagtgagcaaaggcagacacctttgacacagtctattggagcaaaatatgtctaggcttttgcttgcttttttcattttcaaatccatatttccatcagaattttagagttgtttgtttggaggcagagtctcaccctgtagcccaggctggagtacagtggcctgatctcagctcactggaacctccgcctcccaggttcaagtgattctcatgcctcagcctcccaagtagctgggactacaggcatacaccactacgcctggctcatttttgtctttttagtagaaaccattttcaccatgttgaccaggctggtcttgaactcctggcctcaagtgatccacccacctcgacctcccaaagtggtgggattacaggcattagccactgtgcccagcctagggagtttttttgtttttgttttttgagatggagtctcgcactgtcgcctgggctagagtgcatagtgtgatctcggctcctgccgccacacacagatcataatgtgatctgcaacctccgcctcctgggttcacatgattctcctgcctcagcctcctgagtagctgggagtacagcctgctttggcctcccagagtgctgggattactggtatgagccactgtgccctgccttttttttttttctttaatgtttgtattgaggtgtaatatgcaataaaaggcacatatttaatgtgtacaatttgatgagtttgatatttgtatatgcccatgaaaccatcaccagtcaagataatgaacatgtccatcactcctctaaaactttcctcctgcctctttgcaatttcaccatcttgtttgcctgctgcccccatccctaggcatccactgatctgctgttattatacattagtttgcatttcctaaaattttatataaatggaatcatactatatgtatgacttttgtctgattttttttaatgcagcataattattttcagattcatccatctttttgcatgttttagtagtgactttttgtggttgggtgatatttctttttgtggatataaagggagggttgttgatcttcagggattatttattttcattttaaaagtttctcctgaagtagtattttgtttttgaaaatgtgctttgaaagaaatttgtttagaattcatttggccctaaaatccacgtaattaatgatttaatgagttaaatagtgatttaactatataaatatagtttgctaccatgtttgctatgtgccaggcttgatggtgcttgtagggcacagaagaggttcctgtcctagccagtggttgatgtgttcaggagggcctatcagtagtgcactagtgcaccatatcctacatgtgatagagctgccgtgttcttagacacaaagacagctgttatgctgtctttgcaaaaatgttgaggtcttgctttccacaggcttgtggcctgatgcacgtttccagttttgcacaatgtcacagcagatatgccttccacgcccttggtttttcacagccaggcatggggctggaatctcagagctgcggttgctgtggttctctgattcctgctcagaggattgcgtgatgggggctggagtgcaggcaggaagttagccttgtggattccctcatcctcacaaagccaggcgcacagggaggggttgggggtagggggttgccatgggaatttcttccccagccagagagccagggtggagtgtgttgctggggagttggaaatgtaccctcttttccatatccattgttcagtcacgttctcctgaaagaagtcttcttactgtgtgtaagaaaaatcagtaagcctctgataaatagtcaaagactgtcagaaaagggaccttggaaatatctggtccagcctgcccattttataggtgaggaagctgaggctcagcaagcaggagtgactcaggaataagcactcatagcacagctgggacttgggaaacccaggcactgctttagaccttcattttcacaatccacgaaggggggagtttgaagaaggcttggcaaaatttgatagacctgggaaagagattgttaatctctcattctgtgctcaaggatgctgtgccatttaaaaaacaaaaacaaaaaacagaaaagaaagacaaaataattctcccagatgatgtttctagaatgttctgacatcttacagtgtcctgaccttgcacaagcttgttccagtaataacgttaaaattcaggagtggatgttcggcaacatcattgggcaggattttctggttcgtgaatgaaaggttatgggtgacactgtatgtcagtgtggcgcttaccggtttatgaagggcctacatgtgcaatctctacaggaaccacttcccacatggcccctttataccaatgaggaaatgggcccccggagatgaggcacttgacctgaggtggcccaggtggtaaggagaggagccagctttccaatgcaagtcccaatttccagtctcctgttgtttccaccgtgtctccctgcaaggcggctggggcacgcagaacaacagcttgacacagtgggaagaagctgggctttaatgtttagagttcagagttcagctctgctcccctgcctgctgggtgaccttgtggaatactcctaacctctctgagcttcattgtcatcttttggaagatgaggccctgtcctacaggattaaagtatttaaatatagagtgcttaccataaaacttgcttctaggaagcaactggtcagtgttaactccttaatgaggctgaagtagacatggtaaaactagttgtggaaagagatcctataaagcaaaactgaggacacatttacatataccaaggggtgcccagccctgttcttcctgcacatagaatcttaaatgtttcctagattgagccattaatcttcgattttttgcaaaggaagttaagacagagataccaagtgccttgcacatagtaggcctgtagtaaacacagactggatgatcaactgctctttggaggagcagagagtatgcctacacatcatttgaataaaatgtgacagcctgccagagaccagactttgaaggttatagacccagggcacgtggccagagcagctgtcagtggaggtgcggcctagagcgggtagtgtggaggctggagggggctgttccatggcaccagggttgagtgggagtcagtgcagacttaggagagggaatgtgtgttcggggatggggagcggggagggacttctctcagacacttatatggaatctcaggtcatacagagacattgtctctgtgttttatattttcctttgaggacatctccatttaagtagctgatgcctgagcggggagagaagaatgagccttttccttctgttagagcctgtagctgcctcttcagggtcagactttaaggtgtatggggacaaagttgggtcagtgtttgtagaaaaaaggctctttctccatttctccctcctgcttaatccaaggagcagagaacaccagggaaactcggaagtagcggggttgatttgggagctagatggggcctgacatatgaagctgctacctggttacagccaggcagagttgaaagggtgtcctttggcggggtgagaagagagcagcctccaaagattcccctgcaccccgccaggccctgccaggggcccctcccacagttctttgctccttccacggagcctgtttgagaattcagtgattcacttcccgtcgtcaactcttgtttaacgttcccctccattgttaccaaacaatccaggccccagtgatgtgtggtgttctgagagtagaggagggaagagagagagagagccagaactgtttacagagcccgggagatgggcccaggcttgacagccgggccgacttgaaagacaggctgcagtggactgtggccccaacagctgggtgtgtgcagggtgggaaatgccaggcacagccgctcctccacagaaaccactctgttctttctgctcttgatggaagctcctgccctttattgtggtgttagcttctttgttcagttacaccgacagctgagttttctatttggggccatagttttggggtcatgattcctggagtagaaaaaaaacaacataggagctcactcagaaggatccctgggtaaatgccatcctttcctgggccccagtttcctcacgtgttcagggggaaaagaaggtggtggtgaaatgccccccaccagctccaaagtcctgtggttctgaggctggaatattctgcaaaaggacatttgcacaccacccttccactgcccccgccccagtgtcgtgtccaggtccagttctaccagccacagatgtgagcatgtctggaacctgtctacctgtctcattcattccatgacctctgatttttgaggtcagtaattctgcagcctccctcacctttctggtttaaagcaacctcctctctcaggaagttgtttgaaatcaatttaattcctttatatcccacatgacagctacgactgccactgtttagttgatgttggcgtcgggtttggggcttacttggcttttgtgtttgcttctaacctgcagaaagagtcaaagttctgaagttttctctctcatcctttctgtttgttgctccatgtacagtagggaagaggaatttttgttggtagtccacatttttgattacttatttgctctgctgctatattatgattcaggttttctccaaggccctaggtgcctaaaagcattgaaggaatgagaagtgtagacacagaacacctttaagccacttccccctgcaaattagtgtatttcacaggtatttggaatgctagaaggtactagaaggtgagaagacactagagatccgttgaacccatcattttttaaatgagataatccatacctaaagactcctccatgagtcggtagcacagccagagggagggccacacacacccctgtcatctaatgagcagccagggctccagtccatccccagtgtgggccatatatctgtgtgctttctcctctattaaatccaacacttgataaaaatctccagttaacaaatatttgttgagcaagtttattgcaaatcgctgtatttaatgtctgcctacaaccttagccacagatgactctctctccctggtatggcaagtgggcagagcttcctcattcaaaaacattttagcttcctgcacttccccgctggttgctttcgcctaactggcacctgtggctgtcattcccctgctgtttttaattgcacctctcaagaccagctgattgcttaaagaacatttctggtattgggcccatggcagtaatgtgcgtctgtggatccctttgctatgaggcttgacttcttgatcgggttcacaaggctggtgggcagcctgagatctttgcttatttcctacgtcttctgaaaggtactatgaagcttaccagttgctgatgcacgctatcagctaataattccattaccattactattttctgagcaaatgtgacctgcaagcccctcgctccatccaggatgcaggcaaagttaagctaggtttcctttccctcaaggagctcctggcacagttgggaagggaagtcagaaacacacagaagtcacttcatcataccaggcctttggtgctaaatgatgatgaatttgaagagtgtgggacagtggggatggtggactgtaagagttcgaggaggggaggatggagagaggtcattcttagcagagagccacagagtgggttactgtttgagctggaagataattggacctccaagggctctgtccccacctgcacctcagcgcactatgctggtggccaagagtgcaggagcctcacattcagatactgtggctgcaacattttacctccactacttgggcctgttcagcattttgagtttctatgcctgtaaattaggcctgtctaggaagtgggggtgaggtggtgggtgggcaggtgctctgaatctcagctgggactgggtgggctgataccggggagagttgtaagtatctaggacccagcgggaggacgcctcacctggaaccctttgcttgttcctgattgtagctgttttagggatgcagctttcagacaagggccacttagttgatgaggccggcttaatcgaggagggctgttgccaccctgacattgttaagtgtgggcctggcttctctgaagtcctcctttcttgcttgtgtggaattcctgttttcctgcccataggggttctttgctgtcttaggtgaattgccccaatgaaccagaacctttttttttttaggtacaataggaggtctgtacccttagacagaaaggaatgctaattggccacttaactgtcctcagggtacagatgccagaatatacagggcacccattctttgttaccatttgggatggaaactgcttatataagcttgtaaagctttggttcagaaagcaagagaatgtgtatggaacgttagcaattgctgtcatgcaaatgctgcattttttgcatgtaaaggtacctctttacctccatggtccttaaactaactttttcaagaaacatggtcatttcccacccttcctttacttccagctccccattcatacccaacagtggctaactgaaaggtttgcaaatcctgaaggctttggggcttcttttaaaaagaagagactgagttgtaaatgtcataagactgagatggttgtaaatgtcccaaccatactgtgtgacatttgctaggaattgttgtaaaatcactggagtgagcgcttgtcctgaggcactgcctctccgcgtgaatgtcactgagtcgcccggttgacccgttgcatgttatgcagcacttgtgacattgttttatctctctagccggtgactcataattaaggaagtcaaaactgtgcaattaacacaaaacctcctcatttgccctcttcacctctccccaacccccgcccccagtcaggaatgcccgcctgacattttctctaagtctttggaaactttaagatttgttttgatagaacaaggccgccagttatcatcgcctggttccacttgttttaccccaaaagtctgtgagaatcttttccaggaaaaaaaagaaagaaagaaagaaagtaaatcccacccccaagcgtgcagtctgcccacaggaagtgattcatggtgctccgattcgggcagacctgactgcaggaggcgggaggctgggaaccaggtctgggaaaagagggcagagagaggatacccagacctaatggcttctgctctgtggaagaaagtgaaaaacagaatgactaagagtcctgtaataagaattgtttgttttgtgaagttgaactaatagtgaggtttgccggcagataagacttgagaaattgcagttgtcaggggaggggacttttccatgtcctgctttttttttttttttttttttattaagagagcaaagctatttctcagtcttttttttttttttttttttttttttgagatggagtctctctctgtcgcccaggctagagtgcagtggcacaatctcggctcactgcaacctccacctcccaggttcaagtgattctcttgcctcagcctccccagtagctgggattacaggtgcccaccaccatgcctggctaatttttttgtatttttagtagagacggggtttcaccatgttggccaggttggtcttggaactcctgacctcaggtgatctgcccaccttggctacccagagtgctgggattacagacgtgagccaccacgccaggccttatatctcagtcttaagacattcatatattagtggaaggcccagatttgtgtttcagttctaccttgccacctctaagcctgttttcttttctttggagaagagggtctaagatgagaccattatctcacagtctccaatagctctttctccccattttcccttttatttatttatttatttatttattttgagacggagtctctctctgttgcccaggctggagtgcagtggcacaatctcggctcactgcaacctccacctcctgggttcaagcgattctcctgcctcagcctcctgagtagctgggactacaggcttgcgccaccatgcccggctaatttttgtatttttagtagagacagggtttcactatgttggccaggctggtctcgaactcctgaccttgtaatccacccacctcagcctcgcaaagtgctgggattacaagcatgagccattgcacccaggctattttccctttttcctttccctctaaagttagagtttttgaaaaatatttgatttttttaaattgacaaataattgtccatattcatgggatacatagtgatgttttgatacatattaatgtcattatggtgatcacatcaggttaattagcatctccatcctgtcaagcatttatcatttctttgggttggaagcattcaatatcctccttctatttgaaactatgtaatatatgaatgttactatgtatgttactatataagcattcaatattctcctatttgaaactatgtaatatatgattatacatagtaacaatcatatattacataataattgtaaactatgtaataataatattgtaatatatgattgctagatatttgaagctatataatatattattgttaagtataatcatcttacagtggtttaggacactagaactgatttttcctctttagctgtaattttgagacctttaacaaatttctccccatccctctgttccctttacacttttcagcctctagtatcttctattctgtttttacaaagttagagttttggggctgataaatgtttttacctaaatactcatttttgtttccaccaaatggaacatcatgttgtcgtagaatgaaggaatcctttctgtcctatgggttattttcttctccctcaaactgacaatgcaaattaatttgattccccaaagtagtttggaaacagagaagactctaagtgttggctacatgaacaggcctgctgccgagcgagaggcccagatcacccagaatgagaagatgggtctaaacacacctggctttgtgacttactccatttcaagcttcctgtattgttggaggtcagcttttgggggtgagggattttaatgaaagctgaggtgaagtccactgttgccttaagcccatcagaacgttgccaagggctgtgagtatgctgaatgggtccatgagtgatctcttaaaaaaacataaaccattgtcaggcctaattttcagcagagtgaaatggccacccagaagattctgtgaagcctggcaacttttccctttcttccagtagtcacagaccaacccagatctttgtagcatcttttatttgtgacttgaaagttctatgatcctgctgacactcaagaaaaagcaatccccatcaacttggtgcttggagaaaaaagtttgtgaagaccaaagctattaaatagaaaagccctaaacactctcctcctcctcctccttcaatatttaaccgtcttctttgcatgggggaagggaggggctctcaccacagccaaaagagaatctctgctgatttaaacccagtgtgctttgtagtcatagagaactgagtttggagtgtaacatctaggttcaagcccaggcactgttccttgctgggtgactttgggcaagtcactcagcatcaaaaatttttcatctgtaaaatgggagtgatgagatactcagcctgcaggatccctttatccagtgagttactgagtgagaagtgctgggtaaacgcttgctctgaggtgtaaattgcttctgtttggccaggtgcagtggctcacgcctgtaatccaagcactttgggaggctggggcaggtggatcacctgaggtcaggcgtttgagaccagcctggccaatattgtgaaaccccgtctctactaaacatgcaaaaattagccaggcgtggtggtgcatgcctgtaatcccagctacgcagaaggctgaggcaggagaatcacctgaactggaggttgcagtgagccaagatcactccgctgtactccagcctgggcaacaagagcaaaactccgtcttggggggcgggcgggggggattccttctgttttcccgcatcttgctcatctcagagcatttccttagcccagggggatctcaaggggagggaagagagcagatttgccccccaggggacatttggcaatgtttagaggtattttttttcagttgtcacagctgcaggtgggtcacagctaccggcatccagtgtgagggagccagacatgctgttaagcattctatatctgtctctacacaggacagccccctagccccaacaaagattagcccaaaacatcagtagtgccaacgttgagaaactctgggcctcgccaaatccatagcctgatgttgaaaagttcttggtgtctgcgtgctttacagataattatcatcaggctgaactttctccagtaaccaaccttcttcttttccagaaagtacaaattctgtgcccacccatggcccttgggaggtgggatagcccaaggtctaggcgatctttgtgtgtttccagtggagtccagccctcccaaggataaggcaaggtgtttcttggcttccccctccaaggatctgcccaggagccttctgcaacctctgtggctcctgcccaggttgccccatctgcctggggcacttgtcatggacctgagccggctgctctggagaactagcagagggaaagagaggactaaatataatgggaagaagtgaagaagaggccagctgctggtctggaggatggcatagggggctgcagcctggcattttatttggtttccccctagactggcagcattcatgcccaaagcactagatattgtccatttataagttcagatgaaaattgagttgttcttggtggaaatgttttagtgactggtatcaagggttatgaaatcctgttttcagctcttcatgtccaatctaaactggaacattcaaaaacatgcttagcacacttacagaacttgttgggaacactcaggaaactcagctacaggcagagcacatggtcactgtggtagaacttgcagtgagacctcaattatctagaacctggccaaccacatacttgacctcactagatgtctttgtggcaccaaatgaaaagaacaggctaatgttggaaatggagtttaaataaacaacaacagttttaaaaatctttgaaaatgccagggtgtagtatattcagtgtacatcctgagttctgtttgtaactctttgattccaagcttcagaaaattacaattataggctaattttttatactactactaatcgtaatataatcaaattatatgtctttcaaccagagtcaacaactgctcagtccctttttttaaaaaaaaattaaaaacacttgtcatcttaaagaccttcagacaacttaagattcaatacaacaaagaaaaaattgtcttgctgttcttaacctaccaaagcaggcaagtagacgcacatgtgttttacacacgtcattggaagaaggctggcaataccagcttggttgcaaggaaagaggcaattgtgaggactccttctcacactgcagtaatttgctgagtgaccttgaacaaggatcttaatgcatcagagtctgtttcctcaaccccaaaatgaagggattggaccagatgccctcaaggttcctcaagggtcagctgtcacagttctccaaagtgagttttcaggcagacatagagttagccagtgtcgcctcaccaggacattttgttttctgaacattgggcctctgtggtttgtcacatacacccaggggactgggctcataactccctgaagaacctctgcccagaacaaaggatgctttggatttgactgtgtgtaccaaagggaataagtgaacccccaaatcaaacatccctcttggcagatggtgttttcagggctttcttatttgttcctttattaagcagttgtcctggggcggtccattgcatggaagaaataaaggcatgttctaatacttgcgtattaaagagcagcagaaagagagctctcagggtgagcttatagttcaaaggccaaatggaaccgatgcaaggagactttcaagccacaagcagaatttttttctgccttcccagaaggtccgatggaatgagcacttcacccaaacttgaagtcactcaagtcttgcttttattttgaaccagaaaaaaagaaaaggaaaacccacgtagaatgcaaaatttaagtaaagatttttgggccagtcgcggtggctcacgcctgtaatcccagcactttgggaggctgagttgggttgatcacaggtcaggagttcaagaccagcctggccaacacggtgaaaccccatctctactaaaaatacaaaaatttagccgggtgtggtggtgcgcacctataatcccagctactcaggaggctgaggcaggagaatcgcttgaacccgggggcagaggttgcagtgagccaagatcgtgccattgcactccagcttgggtgacaagagcgaaactccatctcaaaaaaaaaaaaaaatgtaattgcaggtgagtgaacacggggatagtagggtagcttgattgctgttcaaagggaaagagatggggaggatatgaaactctgagggcagatgggcatatatctgctgcagcatgtatgttctgggaacatgtgtgtatgtaccagtgtgggttcagggcattcattggcaaccccaagatctaaaacagctcctttttgtccattaaacatagcagatgggaaatgtaaagatacagaataaatggaggtgaaatgtatgccgtaggtttggtttttgagttattaatgtgctacttggggctacttcaaaaaatgaatattagaggagtatttgggggtaagttcacattttatgcaaattgactctaaggcctctaggtaggttgtccttctgaaatggttaagtcttatccagcttcaagatctgggcataggggtatgccccatttagaattagggaaaagaatctgagtcatgcagcctagcttcactttatattaactctgggaaaagttaggaaagttgggtaacctctcaggtgctctgtttctcaatccatgtatggagataatgatacctgcaagttaattgggaaaactggtggtggagtcagtgcatcagtcagctagtgttgcgtaacaaagcactctaaaaacccagcagcttaaatccattgtttatgctcactcatgcttctgtggtggcttacctgggcttggttccttgctacagatttggtttaggtctgctccacatgttttcatttctgggcccagcctatggggcagtagctgcctgggggtgggcgggtgggagagggaagtcccatgatgatggcagaggtacgagaggacaggcagagacatacaatggcagtctgtcccttctgctcacattccactggccaatgcaagtcaatagtctaccccaaagtcacgggacaagaaaatacatgccactcatggtaggaggagtggcagagccacagagcaaaaagtgtggctgcagagaggggtgactaattcactctgtcacagtcatcaagtggccaacacagtacctggcacatagcagcagtcacttccacctctgttgttactattactactcaatgggcaagttgaaaaagaaagtttgtctgaaagtgactagaaagttcggtattaagagcatgtgtgtgtattcaataaaataggtttcaactgaagtgtgataatgttaacaaatttactctttgttcacttctatggcccagttaactggcacagttcttgggatatggtaggtattcaataactatgctgtgattgatgaatggtcacttttaataatggtgatgcagcatgggatgacagaaaaagcgctgttcatccaacctgcccctatctcccatgtatcagccctggtctgggtttgaatcctggctctgccatttacaagttatatgaccttgggcaagcctcctgagttctctgagctgggcgagggtcctgggggtgttgccgtttctgcgtgctcacatagcagtcgtgtgcctggcacgtagttcatgctgaatggatcttggcatgtttctggaacttatgtgctgtgctcctcaccttctccccagcctctgtgttgtcccacagatggctgtgagtggctgatcggtggaagtgcagacgtgagtagcacttggcatgaggtgggccccagccccaccctctctccttggggtacactctggcaggcttcaccttcaccatcggctttgggctctgccatggccacatccttggctgtggctctcaccaccattttgggacactttacgggtcccgcttgaagccaatgggaggaaacctaatttcctgccacaggaaattgttctgctagggaagaatatatttaaggattaaaaccttctgtcagaggaacttgagggagttgctagagaaagacctttgggggtctctcatcaggaagccagtgggtgtgggagagatctcagtcataaatggggaggaggcccaacggcaggttcctgagactgtactcctaatgctagcagctggtcttgggctgggaggaagggctgggccagggagaagagtgggtcataaatagaccattttctgcaaccaagtatatttatggtaacatcagctcagaattaagacttatttattggatttacttaatgggcccagtgccctataaggcctgggagagtgtgttctggacacatcagctatattaaatccagcagctgaaactcccaattcactcttattactttggtaaggattgctacatattttgagtggggcagagggagaaagaaagaacaatgccagggctctgggcagcccagactccgaaccaagaggtgttgttgctgatgcgtaagaagtgaatgagatgtcttccctgtcgtgagtttgggaattgcatggcacagagaagcaggggcatggtccagatgacttttagaaaatactgccaagccagactggcggtcgtgtgctcacaagctggagagtgagaggtgcctgtctccttgctatcagaacccagcctgacagccaggagtcctggccacttggcatggccctgatacagactgctgtgtgatcctgcgacatgcactttgcctctccaaggtatgggtgtatggtgaggtgggaccattgtaagatgtgccttattatccacacggcattgtggtgagaatgatctgagataaggaacacagaagccttgtgaacattcaaagcaccagacagacatgaggactcactgtgaccctcctgactgtgcacccagatggccaaggcagggaaagagatgtgttgttgaggacctaccgtgttccttactttgccggccactatcatagtaagcaggcagtaatagttacatgacaatactgacaatagattcctgccactttctggaatatctttctgggtagtgtctgttcaaatcatatatctctttttttaaaaaaattggattgttaatactgagtgttcttactaatatttcattaaaaaaatttttttaatccctctgggggaaaagaatttttttttttttgagacagattctcactctgtcacccaggctggagtgctctggtgcaatcacagctcactgcagcctcaacctgctgggttcaagcaatcctcccatctcagcctcccgagttgctgggactataggcatgggtcaccacgcccagctaatttttatattttttgtagagatggggtttcaccatgttggccaggctggtcttgaattcctgggatcaagtgatccacctgccttggcttctcaaaatgctgggattacaagtgtgagccaccacgtccagtcagtgttttagatgaaaaatattaagaccaagacactaagtgatttttttcaactttgtacagttagcaagtactgaaccattatttaaactgaggcttattaagtccattgcctttttttggaatggtggtataatttataaataataagccttgcatatttaaagtgtgcagtatgacaaatgatgatatatgtatatacctatgaaaccaccatagcagtaagagaatatacataacctttacccccaaaaaagtttccaagtgcaccttggtaattgctccctccaatccctactccctccctgtaactccctctgtccccaggcaatgactgatccctgctttctgtcactagattaagattagtgtgccttttactttagtttaaattaccttataattttacacgaacagaatcatgcctggcttctttcacgcagcatcattaatttagattcattcatagcgttgcatgtatcagtagttgatccttttttgttactgagttgtatttctttgtatggatatgttatggctcattcatctgttaatacatgtggagtagttttcaatttggggctattacattcatgcacaagtctttggacataggcttttatttctcttgggtaaatactttgaagtggaatggtggatcatatggtaggcttatggttttttagctttttaagaaacttccaaatgtttgagggatgaatatcccaattacccagatttgatcattacacattgtatgcttgtatcaaaatatcgcaagtaccctataaatatgtatagctactgtgtatcccccaaaataaaatattttagaaaggaacttccaagctgttttccaaaatagttgtaccattttacatttgcaccagcagtggaagggagttccagttgttccacatccttgccaatacatggcatgatcaggctttttaattgtagccattctaataagtatgtagtcctatctcattgtagttttaatttgtgcttctctaatgatcaacattgtcaagcatcttttcatatgcttgttgtcttcatatctttctgggtagtgtctgttcaaatcatgtatctcttttttaaaagattgaattgttggctgggcgcagtggctcacgcctgtaatcccagtactttgggaggccgaggcaggcggatcacgaggtcaggagttcgagaccatcctggttaacacatgaaaccccgtctctactaaaaatacgaaaaattagccgggcgcggtgccaggcgcctgtagtcccagttgctcgggaggctgaggcaggagaatggcgtgaccccaggaggtggagcttgcagtaagccaaggttgtgccactgcactccagcctgggcgacagagcgagactccatctcaaaaaaaaaaaaaaaaaaaaaaaaaaaaaaaaaaaaaaaaaagaagattgaattgttaatattgagttttcagagttctagaaacaggtctattatcaaatatacgctttgcaaatattttctcttagttagtgcttgcctttttattcctttaacagtgtctttcaaagaccagaggcttaaatcttgatgcggtctgattttttttttattattattaagtgctttttggtgtggtatctgagaaatcattgtctatcccaaaaagtcacaaagattttctcctgttttcttctagacattttagagtttaagtttcacttcagtttgtttttgtatagggttacaatgtgtagtttgaagattatcttttttacatatccagttgttacatcaccatttgttgaagactgtccttgctccactaaattgtctttggacctttgttgaagccagtcgtccatatatatgtaactatttctggactctgttaggttccattgatccgtttgtcagtccttgtgccattaccatactgccttgattattgtagctcccttgtttttaaaagtttaattaatatccaagtgattcatgtatgattaatattactactaaggcaagagggccacccacttctatcacctagatggagcttacctccacagccccattctcccccgctgctggcatgagcttttctccaaggccttctcttgcagaggaggctatgatgtccagctggcccttttttgggagttttgtcaaacaccgaagagcaaatacggccacttccctaatctgtgggcacccagtggctttgcaggagaaggagaacagctgaataattctctattcccactcaccacttcccactctcccttttactcctgttcaacctccagctcaccctacttatccagggctgggtttggggagtatctgctgtgatagagaataataacgctaatttgtgggtgtttatgaagcactttcaaatggaaaccaagcttcaggaggtcggggggcagaataccccattttatagatgagaaaactgagtgtcctaggaagctcatgagctgcccagtgtctcccagctaggagagtagaaccctcctttaccccaggtcttatggctccacatccgccagtcctccttttatacctcagggacgagtcccaggctgtcttctcgatctgcctggtaattactgtttttcagctgtagggcttccttgttctggggccccaagggaggaaggtaattacatccttcaagatgcccttagtcagcagctccaggtcagttcctgtgaccaagcccagctatgacctttgtctgtcctttccccttcccaggccagtggcttggagagtgtgattggatccctctgtttctctctttggttggtgctgttggtggcatctggccagcccttccttcacagagtgcccatgaattctctgtattcaggcaaatgggtgccctcggtcataagaaggcacagagggaaagcttgcaaatgtctcactgccagccctgccagctattagaaaaattatggcactgactggcagggtcctaggatgggcctccttgaagaaaaagcagtcctgcctcttaatagggtacctgtgactcatgagcatccatctcatctgctccccacttctatccctgctacccgcaatctgttggtcacacgtagccagagttccacagggcctgtctctttcacacgtatgcacagcccacttacacatctcagaggctacatactgcttttagaaaacaggagaagcctttatcatggcctttggggccctgcagagtacccctgcctgcctccccggcctcgtctcaagccagctctctctcatgatcccctctccagtccttctggccttcattctgttcttccgacctcaccatgttttccactttccacagggcctttgtgtgtgcctttccctctgcttgtactgcccttctcccgcacccctttgcctggttagttcttacttaccctttaggccttcaggtcaaccatcacctcctctgagatgccctgtccagtccttcagcaaagtggggtgccatggtcatacactcttggggttccttgttattttcgttcaggacactttcattgtgtgtaattgtaggtttctgtgatgatgatgatgatgatgatgatgatgatgatgatgatgatttgaaacggagtcttgctctgtcgcccaggctggagtgcagtggcacaatcttggctcactgcaacctccccctcccaggttcaagtgattctcctgcctcagcctcctgagtagctgggattacaggcgcccgccaccatgcctggctgatttttgtacttttagtagagacagggtttcaccatgttggccaggctggttttgaactcctggcctcaagcgatccacccgcctcggcctcccaaagtggttttggtgattatttgattaatgccggtcttgcccagtggaatggagggtccctgcagacagggaccactttgctggccttttctcatagtgaagtctctttccttaccactgtatccttagtgtcacacataataggtgctcattaaatatgtgttaaataagggactccattttagtggcacctcctcacctgtctaataccagacactatctgaagttttacgtccctccagaagccttctgcctcccagccttgcctgtagctgacaatgcttttgccgccccaagctccccagtcctttcctgtaagccacccagactctcatcatccagatcacctggggatttcacaaagggaaagattctgatttagtaggttggggtaggcgctgagaatgtacatttttaacaaacttccctgaacctctgctgctggtcagggaccacactttggcctggcttgagaggtaagggcaccgggtcatagctgcttggccaaatcaccatagaagacatggttcacacagggtcatggcactggccaattgtaagtaggcacagtagtgtgcccctgcagtcccagctacttgggaagctgagctgggaggatcacttgagcctgggaggcggaggttgcagtgagccgagatcatgccactgcactccagcctgagtgacagagcaacaccctgtatcaaaagtaaaaaaaaaaaaaaaaaaaaaaaaatccctttaatttccgtctttcactccctgctcaccacaaataactaaaaaagaaaggaggggccaggcacggtggttcacgcctgaaatcccagcactttgggaggctgaggcgggcagatcacgaggttaggagatcgagaccatcctggctcacacagtgaaaccacgtctctactaaaaatacaaaaacaaaattagctgggcgtagtggcgggtgcctgtggtcccagctactcaggaggctgaggcgggagaatggcatgaacccgggaggcagagcttgcagtgagccgagatggcgccactacactccagcctgggcaacagagcgagactccgtctcagaaaaaaaaaaaaaaaaaaaaaaaaaaaaagaggaggaaaggcaagttttctttttttcccctgactttctaatgtgcaagggaagacctgagtgaatgaggggagacagcctttgtactttgtcactcttctttggatcactgtagtcctcatatctgtgcctaaagaactctcattgtcttccccagccctgtcccctctccacacctctgggctgagtaggaagccgatgagtggctcctggaccttttccaagcacaactgaagtgactgaagtgcgggcccttcccatggaatgccactccctgaagagcagtacaaagttggggaacccaccggggactggtgggtgaggcccgctctgccagctgggagtcctcacggggcctttgttgtcttctcctgagatccctcccagcactctcagctagcagtgctctgatctcctggacctctggatctgggagaaatgaggggagagagagctttccaagtgtctgaaagtaggaggccggactctgcagaaagcaagcacaatccacatttccctctctttctgcccctccccgtcctggcaggtccctggatggccggttgcaggtgtcccatcggaaggggctccctcatgtcatctactgccgcctgtggcgatggccagacctgcacagccaccacgagctacgggccatggagctgtgtgagttcgccttcaatatgaagaaggacgaggtctgcgtgaatccctaccactaccagagagtagagacaccaggtatgctgcctggcctgcctgtggggacagcaggtgccaggggtcatcacctctccccggctccccatccccccgagggtctgcggtgcacttgggggtgcggggactttggtgctggtctggcatcgacactgagccacctctgctctgtctcccccggacagttctacctcctgtgttggtgccacgccacacagagatcccggccgagttccccccactggacgactacagccattccatccccgaaaacactaacttccccgcaggcatcgagccccagagcaatattccaggtaggcacgtgggcggcacaggctggcctgggaggcaggggcagcggtcagccccgacatcagtcctgtggccccaatctctgccccctggccgtcccccgctcaccccctctttgcgcacagctctggcctgagggcccctgactcagaaccgcatccctgttgggagaggacccatgacctcagctcccccctcactagtgatgcttttcttggcatagaggagcagcgtgacccttccgcccggccttggtgcagtcatttattttggaagcggaaatagcaacactgtttctctcaccgcccttgaggcccggactggtgttcagtcccaatagactgggggtctgcagaggcggggagtgagctgagggccaggcagcaagtgcggagagctggctctgtaaattcgcctgggcatcaggcctcggtgaggggctccaacctgggtgggaattgaagtgactttgagttttcactctgcagggagaaatgggctttgccgtcaaagactgcaaatgtttttagaagcccctcatttacatgcaaataacgtgtgaatcaccagcactttcagactccaggaaagctgtgcttggcagcacttgggctagtcacttttgcttgctggggcagtaatcctgctgcgttcctcttagagcattctaatttggacgtgacgttcatcctgggttagtttactgggctgagattggctacaggcctgtgtgcttgggtcagagtgttaaggaggagacccactgtccaaccttctcagatcctttgcgggtagccctggcgtcccgcgggtaagtcaactactccctgttcaaagagcaaatcttggagggcttcagtcagggtctgggggaggtttcagagaaatagatcacactgtctttgccgtcattgaacttgcaacctaactgctgagtgaggacacgtcccttagagacaacaaataataacacctggtctgcacagaagaagatagtagggaccaaagggtgggtctgagcctgcagatcttcagaggacagaaaggggtgaggcggaggcaagtctggacgcctccctggagggggtggggcttaaccctcaccttgaaggaccaggataagttagcctggcagaggctctaggagtacacatttcagacttgggagttgatccggtcctgcgtgagcaaaggcagttatgatccaagcgggagtcagaggtggacaggggcgaggacaacagaaccaagagctggaacctctactccaagacctggagctcctacagccacggatgctagcatcatggtgtgcatgtgtgatgtctttgcaaaaggtgtctcagagccaagctgtgaaggccttttaacagaccaccttccttctgattcccagagaccccaccccctggctacctgagtgaagatggagaaaccagtgaccaccagatgaaccacagcatggacgcaggtcagtcatgcagggtcatgctcttattcttaactgattagcagctggtgggttcatcccttccatcccttcctcttcgccctctccctccctcccttctatctctctctccagtatttgtagagcaaccgcgatgtgcaaggggcagggcatagaagagggtccgagctgctcacagatgatgggggagattgacaggacagtcagtagtcactgggccatctcgtgtatgccctgatggaagatgccgcatggcaccaggcacacagcagggccacttcacccggtctggggaggagcagcaccttgcagtccaggtttttccccaggttgagtcttggtgatgtgtaagtgttagccaagctgttagagtgggcaaggggtgtgccaggcagagtcatgggggttgggcaggacagcctggtgcattctggggacagtaagagctcagtgtgtctggagtccagagagtgtctagcccagggagctcagcgtggctggaggatacactctctccagtggggagaagatgggagggcctgccacacaggggtcccagtgtggtggaccttcaagctagccagaccacttggcatttagtcagggctgatgggaaccgctgcaggctgtaagcagggcctgtgccttagtgagatgtcaccagcagcagggtagagagtggccttgatcacctcaagcagtcacatgggaggcaaggagaggctgaatggaactaatgcctcttctgatgaccagtggagacccctgaagccagtatttttgtgtgacaaccacatgtgatgtgtgtgctcctgccgtgaggggcagggcttatttctctcctgctacatctccagatgtttcccatatcatttgttataggaccaaattggctccagaccagcagcttcttgaattgaaccccagctgccacatagaatgtgtactgagttgtgtgtggttgggagaggaggagaaggggagagggaaccacgcagatgttccattccgatggtggtgggcatgcctcgtacacacagagccgctagacacagcagagccacctgccctcgcacacagcccagaagagattgtgcaattccttcccccacctttcccagacagagtctccctctgttgcccaggctggcgtgtagtagcgcgatctcagcttactgcaacctctgcctcctgggttcaagctattatcctgcctcagcctcccaagtagctgggattacaggcaatgcagcaccacgcccggctcatttgtgtatttttagtagagacagggtttcgccatgttggctaggctggtctcaaactcctgacctcaggtgatctgcccgcttcgacctcccaaagtgctgggattacaccgcacctggctgaggttgtgcaattcctgagagaccgaaagagactcgcatgtacattgtagttgctgaaatccagcctggacatcgtggcacttttgggttgagcacacccggtgaaacacacccacccggcggagtgactagtagcgcgaaccagctggaatgcatcgaagaccttcctgtatccgatgccaagtgaccgctgcaagcttgcagctattcagtgcaggcgtgggaagcaggccagcggagcagcatgtctccagctgctgtgtttcttcccactctgcgctccctcttccctttctgctgctctccatatttgcacaatgattattgttacaaacaaacatggaccagaggggctggagattggaaagagcagcccagatttcaccctgtcagctcttgtttcttctccctcctcttcctccttgtgcctccctttactctgtcccctctcccttcttcctttcttctcattaagtgtgcctgcagggtcctgttgtgaacatgagtgatttatctacagtagagacagaccagacttgcggaccccagccagtgtgtgggtgggggctctcctgttttagtctctgttcttcagagttgcctgcttggatagtccagttgctcacgggcttggcttccctgccccccagggtgtggtagtgtctcgggccagagggtcacgttgttccccatgtcccttcacctacatatgcgcccttttagacttgtgagaaggccccttggacttcctaggtctttgtggttcaggccagcacaaaacaggggacaagcatttatccagtgcctaccatgtagcggtcatggtgtaagcatttttatatgcacagtcttacttaatttttacatgtcacacagtagatgatattatcctcattttatacctgaggaaaaaattaaggctcatagaagttaaacggcttagccaaactcacgtagctgattcgtggggttgtctagaccctgtgactgattctgtaacttagttctctcggtgaatattccacatccccctttgcatttggggttacaggggagaaggagaaatccgtggttcttcccttgccctcaaggaggttacagctgagttggggcaaaagaagagattcccacaaacagcgcaaggcagcattcacttgaggccagatgctggacccagtctcaggactgatagatttcatggggtggaattagaccccatagggtggttaacaaatagtctccttttttatttttattttttgaaacagtctcactgctgcccaggctggtgtgcagtggtgcaaacacagctcgctgcagcctccatctcctaggctcaagtaattgtccagcctcagccttcaccacttacggcttatttttttttttttttttttctgtagagacagggtctccctatatcacccaggctggtctcaaactcctgggctcaagtgatcccccagtctcagcctctcaaagtgctgggattacagatgtgagccattgcacccggcctccgcagccttcttgatagaggaacagaggagcggggacgagcaggatgctgctctggaaaagtgtccactgttttatttttgaaggctgataccatgtgagttctttttttctggaggtgagaggtgtagagaacataatagagtaagaattgggtagattgagactttttcccacgtgcatcatcatcttttgcataaagtgtttgtctggttgctgagttgcagggtttctgaggcaggtttgtgagtttcctgaaattgatctttccagcacctgagctgctgcagcctctgaccaaggtcggtggctggtgatgctggggaggcctcaagccctgcctgtgtgggagggctggcctcctgcttcctgggtctttgcagcttgggagaagggcttccctgctcctctcattttcctgagggcatagttaatagggcaggtggtgtaagctaaagaaaaaatgtgtcacttattctagttgagaatttagcagccctgagctgggagtcttggttaggatcataaaactatctgagacctctgagatcataatcataagagacctctgagatcatccactcaatgcattcattccagacaagaaattggggcccagggagggaaagtagaggcaagggtatgggctaggccttctcctgggacccctcagtccagggttttctttctgctgtgttgggctacccctccttgatatgtaagtgtttagtaacttggctctccaggccaagaatcttttgtgaagtctcacaacttgtctcacctcgcaggttctccaaacctatccccgaatccgatgtccccagcacataataacttgggtgagtatctccttgtgcacacaactggaaccccctctagctgcagccctggcgagtcgccagtgtggggagggggccctgaaggtaaggctctcccccgacccctaccatcagcccagctcagcccatcaggtttctggttacggtgatgttgaggtcaccacggaatggggaaacttgagaacagtggtggcaggaaagacaaccatatgccaggtttgtatttcccctggggggcgggtagacgtgagtgaatgaaaattcccccaaactttatgcccaggagaacgagggtctgtggtcagctaagcatacgtgtgcagtttggtgcaaagccacggacagccatgcagactccagccccctgacatttatagacctgtttcagatatacttatttgagtgtttcatcttataattgtgtaatttttcttaaaatagcaacatatacggaatttgaaaataaagtcaaagtgcccataatcccaccaccctaacataactgtctatgtgtgattacagtcctgatgtttgtgcatcaggcatatatatctctgtgccttgccactgagatcatagtgcatatctggtgttttcattctcttttctccttatgttattttgtaaacacgtttccgtatttaggtgtcttgtttatcgttgtgtgttatctcatgatgttttggagtggagggtccattgtttccgcaacatccctccatggttagactgctgggtcagtttttccaagactcaattttctaacccagtagggtccttcagttctccagcttgggataggctttggcatggaacctgccaaagggcttcaaacaaatgaaatatccatttagtttttattgaggggagatttttatattctggtctggtagttttagaaaatgtaagttggattttgtttggaactttattgctgaggcttaatttgtggctcaggaaaagaaatagttaatatttcttggcgaatcaaagtggattggactggtttttgtgcccatttgcttccagaccttgactgacagcgtcagatgaagaaactcatcatttggaatattaggagatgcttgaaaccctttagaacaggctgacctgggcagtgtgggatgtgactttgggagatctgttttaacatttttgtaaaataatatcaccatgagtgccgggctttgcagagggaaggtcagattcctgatatgaaaggactgagttattaaaaacaaactgaaggctagaagcgaagttaacacttgagaaattaaaggccatgatggtgaacttgactccgggctttcagcttttgagattggctgctttagatttattttctatggcatttaaaaaccctcctggggccaaggtagcacttttagtcaacagccttccaagcagacacttgcctttgaaaccatagcagtcccagggcaggttggaggtggctgatgccggacacggtgctccagactgaaaggtggtcatttgctgtgaacttccctctagattgtgtagactaggatgaggatgatgggatgtttcttgagctctgacccaaggcagcatcctctgttgacataattctccctccctactgccccttcctcgggcagcttgcctgaaagttgagaattcttaggttatttcttccaaagggaggaccctccccgagcctggccagcagagaatgagtgccactttgcactggcctagttgcacctctgctgggaagatgtgaatcgggggcgagtcgcccagtgagtcagggttaggcttctgggtaagacaccgtgctgacaggcctggcttcccctctgcttcatgagcccctgtgctccccttcacccattcaaaccattgacttcatccctacccagaaggtcacctggactcccagtgtcatagctggaagggggtgagatggtgatgatgatgggaaacatttcttgagagtttgctgtttactgttattcggagtgcttcctgcatgttaacctgatctttataactttataaggcagaagcgttgtgatttttcattttacagattaggaaaccggggaacacattggtgaactcatgtgtcccagattcacagctagtgaatggagaaggtggctttgaactcaggccctctcactccagagcgtgcactcccattgtggcatgacactgccttgctgggccgtttagaccacctgtccccaccttcctcacttggaggaacaaggctcagacaaggcatttgctgacttttacgttggagacgtaaaagtctgtggctgtggctcccggggggaagccctgcctgcttgtatgcctcttcctcactccctcattcccagatacttcttgtctgcctgccgttcaggtgggggattggaagagggaccacagacatagccatcgaggggctacggccttgttgggatcaataaggcaggaccaaaaatgattctaaaacaagaaggaggtgcagatgaagtactctgagggttcgagggatggagcgatgggattccaggctggccaggcgtctcctctgtatccatgcgctcagtcaacattggctgagttcccactatgtactgatgctgggggccagagctgggagagcactacacatttgcagcctgggggcggggaggggggcagctggaggtgtccatgtccacctgtaatgcgttgtgccaggtgcccagggagaaagtccagaagagggaggaatagtatatgccaaggaggaaagtgtggatggagtggggagacatgggagaggttgtgccatgtgtgagcgggcccttgaaggacagatgggaccctgtgaggcagagaaggatggaaggacattgcaggtccaagggcattatgtggtctgaggacagctggcatggtggttggttgttgtctcaagagggacaaggtgggaaaaggaggctgaaatggcaggtggggcactgggaaaagacccctgagtgtctgcttagcgccctcttgcctatagaataaagttgtttgtgggttttgattggggaggttttctgatgacagcttcataaagattaatctggccactgtgtggaatctaaattctaggggaaattactggaggcaaaacaaaacaaaacaaaacaaaaacccacttagacagctcttcctctggaggaggctgagataaatgctttcgagaaatggtagcagagctgggagaatgcatttgagagggaatcatgggcctgaatgagcagggtttgttgaccagcgttaagtgggatgatggtgatgcccccatcgaggctggacacccaggaagtggaatgggttgggggtgaaagatggtggtgggttgcctgtgcttaactatgtccaggaagcagttggaaagtcaggaaagcggctggcgctggaggcgcagatttggaaaccatgaacacatgtggcagcctttcccatagcggggcctgagagaaggggtttggtggttgaatgagtgtggaaagcctgtattgtggcctctcctccagcccccactcaggagggactcacatggccacgctctgaggagcctgcagaaggaggcctgtctgacccagccttcctcccatgcactgatcactgttcctgtacttctgtcttaccgccccattacccatccatagatctgactctggaaacaccgatgaagtttggctgaagtcatgccagtggatggatttagtggagaggccgacccagctcaagatggaaagacagccagagatgcgctcgggtggtgggggttccttggagaaggctgaggtcagggggatgatggggtcacagcagctcagaggggaggcaagccctgaaggacagtggctacaagcgggccctgcagagatgcaaaatgagatttaagaagaggccttggatttggcatcagggtttcaagggggagcttttagggagcagtgtgtaggaggggaggggctgcagtcagtcagcagtgcactgaagggcaagtaccaggtggggaggtggaggcacccagcagcgcagcctttgtgctgactcacagtcagtgcgtcccaaaccctaggatggaggcaagcacacagggagctcttcctaggaaaaaatggggacatctcaggacatctgattatttcctttaaagagattattatgaaattactgtacaaaaagaaagaaagcagaggacatctggtttctcctttcatttcctccccactccaggtgttagccccagggctcaggtctggggaaggttgagcctccttgccccagcaaagccacttctggtaaggggcagggactcctggttgagacctggctcagcatcctgccccaggcaggctctcggagaccctgggacctgggaccgttgtttgcagggcaggagatatgagcaggtgatgttcctgttattacacagcgtgctgggtgagtcaccgggaatttcctaggcatttaaggcggaaggattggggtaaatggaggggaaggaggaggcaggtggagagaggaaaaaggtagtgagctggcttctgcctggtgagtaagttgttccctgctttaaagtgagatgattagggcggagccatgactgaggaaaataatgtaccagggagagccctgagggagcagttgagctggagttaaaggaggtgatggcttccagagtgccagtggcaggagtgagaggcagggatggggcagcttggagtgagagggatagggcagcttggaggtggctgatgccggatgcagtgcttcagactgaaaggtggtcgtttgctgtgaattgccctctagattgtgtagactaggatgatgggatgtttcttgagcttggacccaaggcagcatctcctgttgacatagttctccctccctactgacgcttcctcaggcaccttgcctgagagttgagaattcttaggttatttcttccaaagggaggaccctccccccagggtgccactttgcactggcctagttgcacctctgctgggaaggtgtgaatcgggggcaagttgccccgtgagtcagggttaggattctgggtgagactccacgctgacaggcccggcttcccctctgcttcatgagcccctgtgcccatgtgtgagcacaggtgtggtggcagggcggcccgaagaccaccagccctgagtgtggacggcggcccagggcagaggcccaacccagttccaggcatcttcatgctgctgcccaaggctcttttacaatgcagcctctggctccggtcttccccacacttgtgaaatcacaggcagggtcttccccacacttgtgaaatcacaggcaggcaacataatgacaggaagtcagctgtcggctctgtcttcatactcctgagggcccggtttttagactttgccactgttcctggttgcagtatgctggtcataagctaaaagggcatgggggtctctgtgcagcttggtttggtattttagtccgcagatacataggttggaattagtaccctgggtgctgggacacagctggcgtgggctcacagagacctcatcctctagcataggagactcaggtacacagtttctgggacacaaggttaattctgcactgaggcagtgagggagtgtttcacagccgtgtgagctgggccttaaagatcgagtccctgcagaggagggggatgggcagtccaggcagaggacccaggcaggactgagaagtggtggatgaggaacatgggaactggagtgtggaatctcctagattgaggaagagctgccttccgcaggtgaggtgggcccagcagaaaccagcccatttctgttttgacctttcgtcttgcagcagcagtgctcctggcctttgcccgttccttgctttcgatttataggagaaagttaatttccccccttgcctccccacctcttcctttacgggatttgaatctcttgcacatgtttttaataggcatcccttaatccaagtgttgccttctgggttttattctgttttctttttcttaaacataatggaacgtctgtgccagcttggaacaggactgaaaactgaggccagccaatgcgttaggctggcagggggccagccatggattaagtgccctatggcacttgagaagtctggccgacaccacactggtgggggagggggatccacaaaggctggagctggaggttcctgcgtctccaacacctctgcactgggaggagagattagcacagactcagaaatctggccaggagcagggctgtttgaagggaaggccgtgggcacgtgccatcgtctaccaccccagctgtgcaaaatgctcagcctagaggtgaaactgctcttcaatggggtgtgtcaccttaccccccgtagtcattctcctagaggagccttctatagaactgcttctgcatttgttggtaaatccttgaaaccagatcttaatttgcttgcttgcttgatcagttgattgattggtcaggggaggggttgccacctccccctgagagatttcttttaagatttaatgccaggacaaactttgttttccctgaggaactagtaagcattgcccatccaccaaccagagccatagaccatgtcatgttccctttttgtcttgtctactaggaagctcagagccaaactggatgcttttgcagtaactataacctcatggttatcccatttatagccgccttctttccagagtcctttttgtttctctggtactaaccagggtaaggataagtactttgggaaagaaatgagggcatatttagtgttttgggtttttttttttttggtgtgtggcagagtcttgctctatcccccaggctggagtgcagtggcgtgatcttggctcactgcaacctctgcctcctgggttcaagtgattctcctgcctcagcctccagagtagctgggattacaggcacccgtcaccacacccagctaatttttgtatttttagtagagacggggtttcgccaggttggccaggctggtctcgaaatcctgacctcaagtgatctgcctgccttggcctcccaaagtgcttgggattacaggtatgaaccactgcatatggtctgtttttttgtttttttttttgttaaggaaaaatgtgccattgaaggcagaacccacaggtggtgaccatactttctggtctgccactcctcttgcacaagttctgggaggaagcagctgaggcatggtgggcgggagggacctagaaaggagggaaatcacggctggcttttagttgtttgcagagaatagaaagcgcatggctggggtgctgctctggctcagtcccgcttctgaacacagggcagcttgtccaaacagcactctctgaaatggcagcctgcagactttgccactggcctgatttcactgctccctcaaacaagcatcttcttaatgatgtgtcaggttcctagtgtccggggttttccacaacactgtccggtgtgtgtctgtgagttgcagggctgtttggataagggctcagatctgcttgggagggcctctcggcctatgaccccaggcctgtctttgattctgagggtccttgaagcccacccttccccagagcatggttctagcaccatgcgacacaatgggtggcctgccagctttttctttttttgaatggtgggctgggttgccgttcctgggagcctagctctttctcttctgcctggactaaacccagagaatgctgggcagggctttatgattttggggtgaggaccctgttctgttctacacattgctgagtaagtcagggccagtcaaagctatatgttcaagctgacccgtgccagagaatgatctaggtggtcagctttattgtagctttattgtcttctagtgtaccacagtgattgtacggactacaaaactgaggttacagaaggaggtcatgtccccaaggtcacacagcaggatcagcagagcctgcgcttgggcagtggtggccagcagcactgatacattgcttgaccactctgaatgcttgggttgcacttggattttttttttttaagtttccaaatcaacatagctcacattttagtgaccacattgtttagaatatagcttatctcattggaatgttgaagcatcaagcaaagccagagccagacgtggctgacgtggctcagcctcacctcaggggccagggcacaagccgcagctgctcctggccctgtcattcctcccttccccattaagtacttttgatgccttcatccttatcttcctttgctccaccccaggaagagagaaaacgacaagaatgctttgcctctccatcttgatggtgatcaagataggaccaggctattttcaagttcacagaatcgggctattatcattgttgttaacaccatgtgctgagtgtttgatgcgcgccctgcacctcacatgagttatctctgtctgtccagaaacagcgccgagagtaaagaggatgaggcccacagagtgtagctggtttgctcgcagttgcatgtctagtctgtgcctgagccaagattgacctccagtctgtctggaggatggctttatagcttgtgccccatgatccagttaaatatctagggcaatggttttcaactggaggccgttttgccccctagaagacatctggcaatatccgcagcctttttttattgccacaacttgagagggtgttatggatgtatactactagcacctagtgggtaggggccaggatgctgctaaacatcctgcaatctgcagatcctccctcccacccatccacccacccaacaaagaattatctggccccagatgtcagtagtgctgaagttgaaaaacctgacctagggtgtcctaatcctccagctgacacttcctgggtgtgtgtggagtgcaggggtgttactggcctgccccttcgccattcgtgatagtgttctccttgctcttagaaaggatcatgcacctagactccaaaaggggattgggacactctgtcctgcaggggcaaccagaccccttccagtgggcagaacagcttctgacttttctctcttgggctttacacaccttcagaaggtctgatgagcagggatcctcccagtgggttccccctcctagacgttgcctggcatccagtgagcagggttctcaggccagggctgagacgtgggcatggggagcgtctcctgttcctccctgaggaggaaccctcagccccatgctgagggttaaagcgagggaggagagatgtcagcctgggccctgggacctcatggtcaagttggacagtcaggatgctcacagagaggcacacccttagtaactgcgtcgcttcgggtatatttaagagccagagggacttcagaggcaggctgaagctttgagatggaagagcgagaatgagcaggggactccctaattcttcagcagatggatggaattcaggtaggcatcaagcagagtgtcgtaggctaagggctcgcgcccagcagtcagtgcagtgcagagaagcagttggaagaggttggcccagggcgcagggcagtcctggtccagaggctgtggcatcggtgtgagtgggaattccgagggcccggccaagggctgagagaatgggcctggagatgctgcagaggcgtgcagtaggagggcacagtgccagggccactgggccggggcaagaggagggcgaggaggccccaggaaatggaaggctgggatccatttctagtgtgaggagaagctgccatttactcttctgagaaagagaaccagccccttgtagaatggcagttttgctttgaggagcccctaatggagactgtacagacaactgggacaaatacagattttctttcagaagggtttgtgtccgagccaccccaacagccggcatctagataagtgtggaaaatagtttctgtgataggaggcatggccccaggctcagtctgcagatgatgcctggtgtgtccactgcgccaacatggggcgctgttgggaacccactcggctgctgcaggcttggaagctgctgctccacaggctgggagtttttgcccccaaggctgtgcagagccaaaatctgaaagcccttttaggggcagggattaatgtgggttactctggggaccttgcaacagaggctgagaggtgactgtgcaggaggtgtggcctgccccacagtgagtacacgcagtggctgtcccaggttcatccaggtactgggtggcccctggtcctcttcaggtttggcccagcccctccttgaagactccttccatccagtcaaggccaagcaggcggggcagggcctttatgagctaaataaataaataaataaataaataaataaataaaaagagaaatcaatggccctttacacacaaggctgatggaatctcctccagacacctgagcatcttgttctggtggctcttgccagttttatacgataaaaggcatggggtagggagattataatccctctgaaatgcggggaaatggttttccagagtgtccatgggaccccatcgagggagcatggggcttgggacacccaatgacccagtagcccaccctgtgtccacagacctgcagccagttacctactgcgagccggccttctggtgctccatctcctactacgagctgaaccagcgcgtcggggagacattccacgcctcgcagccatccatgactgtggatggcttcaccgacccctccaattcggagcgcttctgcctagggctgctctccaatgtcaacaggaatgcagcagtggagctgacacggagacacatcggtatggggtggctccattccccgcccccccaccctgcccctgccactctatcccacccccagccccaggcctgaacacacagcctctgaagggaaccttgcgtccatccttagctgtgctctgcctcctgctgggcatgggggaagactcactgccccagcaagtcccctacactctctgttgccctgtttaggggccagacaggtagtgttcaggccacttgatcattcccactcaaagatataatctcagaaaatctggaagccacagaggaaaatagttcatctaagggatcaagaagggaacgtctatgagaaaggcaacatatgaaatctattttttttttttttttggagacagagtcttgctttatccaggctggagtgcaatggcacaatcttgcctcactgcaacctctgcctcctgggttcaagcgattctcctgcctcagcttcccaagtagctgggattacaggcacccaaccaccacgcccagctaatttttgtgtttttagtagagacggggtttctccatgttggccaggctggtctcgaactcctgacctcaggtgatccacctgccttggcctcccaaagtgctgggattacaggcgtgagccaccgtgcctggctgaaatcctctaaataaaaatactctgaaagtacagatggataggttgataagtaggcagtcattgttggaagagtgatcttctcttattttcatgtatcattattctaaacaatttagaaaaggtagaaaagaattgtccactatccaaacaccactactgtgaaccttctgccttctagcccccagaacataagtaaaagatgactttgtgagtttaaggaagatgaagctgtgttacgcatcacttggtttgcttatgaagttatcaagcttagaggattttacgatccagaatcacaactgtcagaacttagaagggctgtagagagatggcagagtgaggttttctcagaccttgtcctggagccccaagggttggcaaagggttcctgcggcaaactcaggaggtgggcaggttagcaaagggaagcctggtcccacgtgaaccagggcacctctgcactcgcttgctttatatctcgggctctcacagaagacttcatttgaagagaggattgattctgtagtgaagagaagaaaagtttggaggccatgggcctaggtctgtgctctcattttctaggaaagggacctgatgtctagggggttggggagggtagggaacggctctgcagagacctcattgtcagtgacagacagccaccactaccagacctgttgttcccatttcgctttttgttttttacttcaaaaaagatacttattctgggtggcataccactgtttgattgattgattgatttagagatagggtcttgctatgttgcccaggcccagtcgcaaactcttgggctcaagctatcctcccatctcagcctcctgattagctgggacaataggcatataccactgcaactggcttttttctatattttattaaaaaaaaaaaaaaatatatatatatatatatatatatatatatattttttttttttttttttttggagcggggagaccaagtctcgctcttgtctcccaggctggagtgcgatggcacaatcttggctcactgcaacctccacctcccaggttcaagtgattctcctgcttcagcctcctgagtagctgggattacaggcatgtgccaccacacctggctaattttttgtatttttagtagatatggggattcaccacgttggccaggctagtctcgaactcctgacctcaggtgatctgcccgcctcagcctcccaaggtactgggattacaggtgtgagccaccatgcccggcctatttttttaagttactgaaacgaaacaaacatttttggtctgggtcttcgcatccccacctctgccttctgctcttactgacatgatacagttgtggacagccaggaagtcatccctcctgtggactctgagccaccagcaccctgcagaactaaagccagaaaaaatggggagtggttggaggaaggggacagtagtgggaataggaggcaggacaggggacatccagtgatgcatgggtcggtcacctcgtgttcatcctaccggatgctgggcctgtaatatctggctccgtgttctgacctctgagcttcttccccaggaatggagcagagactttgccatgcaggagaagggaccatcccctggccgagcaaagagctcattgtcagagtttacgcaactgtttgagttgcagagccaatttaaaaataatttctgtccatctggagtggatttaagagatgaaagaaaagtaaatgatataaacctctggaatgttttagaaaaatgcattgagggaagaaaaaaataagggcatagcgttaaaccatccctgcaataaagggctccttggggtgtctgctgcatcagaaggagccctgcaggtttactgaatgaatctctgaatcttggagtgtgaagagaccaaataatagtggggtagtagtagcagtagcagcaagaaaagctgacaccaggcacttactgtgtgtctcacagtaatcctgcaagggtagaggttatcatcattccctttttttttttttttttggagttagggtctcactctgtctcccaggctggagtgcagtggtgtgatgggagctcacggcagtcttgaacccctgggctcaagcaatccactcacctcagcctcccaagcagctaggactacaaggatatgccactatgcccagttaattaaaaaaaaaatgtttttgtagagatgaagtctcattacattgcccaggctggccttgaactcctggcctcaagtgatcctcccaccttgccctcctaaagctctgggattattggtgtgagccaccgcgcctggcccccatccctatcgtagagacaaacgaagactcagagggtgaataacttgactgaggcccatgcctactcagtggcaaaggctgtcactgagacctatcctgtgtgcccatctcttgtcatctgcctcccttggctttaggaatccggcagtgcccatttcccctactttaggcttgggctttggggcccgtttgcctggggaagctggcagtcactgggagcagctctgctgttctgcctcctttgcgagcctcaggtggccccagggccattgtgtgtgagcaaaggcaccctgtccagtctaacctgaatctctgtaggaagaggcgtgcggctctactacatcggaggggaggtcttcgcagagtgcctcagtgacagcgctatttttgtccagtctcccaactgtaaccagcgctatggctggcacccggccaccgtctgcaagatcccaccaggtaaacgagccgcacaggcacccctgccttgaggtccctctccgagtgcatgcctaggatgctggagagagtccacctttctcaccttttctgctcactcatgattgcgttgtcaatctggaggtgattggattaggttttctctatgcccacagatctaactgtgctttccctgaacttccagggagcagatgtagcatctgataggtctgcctttaacctgtgggtacctgcctgttgccctgtgcgtagatgctcaggcagtatggcttcctttcttcactcattcattgcacaaacagcatgcagggctctgtgccaggtgctgtaggggatgaagaggtagatgcggccctgctctgcccccgcagaccttacaggcctgcagagcacagaagacaaagacacggatgagttcaatataagggacgggtgccaagcaccaagccagcagcccaggtagagagaaggcccatttagctgttgggatggatcagggaagtcttcatggaggagaaacatccggatcctgaaggataggtaggcactaggcacagggagggcattctagacagggggagcagcccaggcaaagggcctgaggtaatggagggcaggacatggatgggtagctctctggctggaggagggtcatgtatgagaccgtcaggggaaatgtttcaaaagcacaacagcatgaggccgtggaaggacaccagagagtttgactctagggaactgctgagggttttctgagtgagcctgaaaaatcccacctgtaccccaagaagaggtgtcaggctgcacccccgagagtggtttggacagggccacgcctggacagcaagatcaggcaggtggctgatcccatctaaggcctctttcctcaggaaaccaaggcagaaagccccagccaaagtccacttttcacaggacgtgcagccactgtgtaggcagcccacagaacatggcctgtgacagactagtggagcaggtaacctggccaggccattgcctgtggcacgtgtgtggcatgccccttcctgcccactgagtagcagatggtagtggagaagtggtagaccacaggcaggggaaactttagaatgcagaaagtctgaaatgataatagcacaccaggtttccagagcattttgtggttgcatttatagagtacattccgatcgttgacctcatttagtcctcaccagttattctctggctctataagtaaggagacgctttgagagacaagttcagagagtttcagccacctgcccaagcgcacacagctagtaagtggccaagccgggatggggcctagggctgatggactctcaagtttggtgctcttctgcttcttggctctgctgggggtcagggcccaggttcagccctgttccaccacccttgtccttggagagaatgaagaagaggaagctcagtgacgctcttggccttctgcctcttccattccccggccccacccccatcttttgggtgagggctgagttggctgtggtgttgtttgtcagctcatagaatgtcagagctggaaggacctctgaggccagcccttcattatacagagacacagggtccccaagagaaagcgaccagctcagagtcacacagcaagaacaggagcctgctgttggctcattcataagcgtcaccccggctcaccttttggctatttccagcatgtgcttttgtctttatttttctggttgacacattcctggcactcaggcagtaagacttcaaacgacatttattttaaactttatttgtgactgtctttagttttactgtctggagaatcagatgcacaccttcacttagctgtgaatgtcacctccacccagcccagtgcccagaggccaaaatttggcccagatctctccttacctcctagccccagcaccaggtgtattcatcagaggagcccaggtggagggtgcactgggccctctgccaagcttcctgtggggacggcaggcccagtagcctttcggccagcccgtctctgggggcactgcctgctgtggaacggccagagctcctgttcctaggtgggtgaccagaccccacacagcatgggcaacctggcccaggtcccttatctctctgtcccctggtccctttgcccaaggaaaggcccccctctccacaccatctccctatttttggaagccctctttgcagacttctccctgctctgggagtcggagcttgtgggccagccttccatctccccttgcaggtatgtcagtggcacctcccagtgaggagatgggttcaaggggagggactgggttggccttccctttgcatggtactgagtgtggagtgtgtggcaaatgcatcacacaccatgtgtccctggagctgtataaatgaggctggtctagggggtccaggacttgctttatccaggaggggagcaacggacctggccacttccatccccacagccctgtttctgtgtttttggcaggatgcaacctgaagatcttcaacaaccaggagttcgctgccctcctggcccagtcggtcaaccagggctttgaggctgtctaccagttgacccgaatgtgcaccatccgcatgagcttcgtcaaaggctggggagcggagtacaggtcagttatgggtgctgcctacatcaggggacccaactccaggtgactctggacagcagagcaggcagggctcctcagagatgagctaggccagccctagcgtcaagagcagaaagaccaaagatcagagagaggccaaggcctggcaggcaggaggggccgggccaacagcagatgatgaggaattgcagaacgatgtttgctggcaccgaacagctgtaggcactgtaaacacacgctccatcttatcctcatcccagccctgggtggggatgccagcatcatccgtacagatgagagaactaaggcccagggagggagagtgacttgcctgcagtcacactggtagaagagctgtgtctagaactctgccctcttggcttcttccttagtctcattttaggcagatggctttaggatgaccctcttcaggaagttaggtcttcagctcattgttcctctcctcctctgttgctccatttctgactcagggaccctggtgatgctgaggagcccaggatattaaaactgagagtccgggaagggaggaggagatttgggtagttataaaggaacaaaattttctcgctgagaaatgacttttttagagtcctacatactggtttctttttctttttctttttttttttttttttttttgagatggagtctcactctgtcatccaagctgaagtgagtggcaccatcttggcttactgcaatctctgcctccaggacgtgcctcagcctcccaagtagctgggactacaggtgcgtgctaccacgcctggctaattttttgtattttagtagagagggggtttcaccatgttgcccagggtggtctcgaactcctgagctcaggtgacccacctgcctcagcctcccaaagtgctgggattacaggcgtgaaccaccatgcccggccctagatactggtttaaacatggccctgatatagtcaggtctacctggtctgcttggttgaatctctcaggccatcctgctttgggtttagagaatccagtcccttttctttccactcacggaccaaagtttgcggagaggcagggctgtgtgcccccgccttctgctccacactcccccctgccagccgccagctcctgcggcagatgcagaggtgcccacatgtcagctagagccagcgccttgcaagctactctccctttctcttcatttttccagatgtttggaatccattttgttttgcagtcatgctgcactcaggccaaacccatttcaatattggccttgggccaccgtttgtaatgaaatccagatgagcatgacttatggaaagtcagattctcattagaggatttcatcctgtaaaatcctcctcttccacttaccgtattttagctgctgttcttctgtgtctgccccagggtgtcagggaacacagccccttggtttcttgggtgtctctgaaatccaggagtgaccagtggagcaatcaaagtggtcagacctcaaaagaacttacaactatgttatggcctgaagagatcagcccaggcccaaaggtctagccagagaaatgttttaagcaatcttttagccctggcttagctcatttagggaacaggagtgaaaggttagaaaattaatctttttttagtgaagaagggaaatatttaaagatggactgcagtggaaaagagtaaggggatgtccatttgctcttcttataccagactgtagtctggagggccacactcaggtaccctcgctcgtgcagacaccccagggtctgtctgcaggcccatttctcaacctccctgctacacaagcaaagtagaggccaagcaaggagggtggtgccttcaagacagcaacactgttcctggtgtggcattgcagctctcccgctccaagtgctaggaagaggctctttggtggcagagcctttccctggggacactatcaccacgcgggatgtcctgccagcacacccagtcctctgtggcccaccgcgtcaccgctgcctggcagcactgcacagcagcctgacgggcgggcgcggccccttcccagaacagccttgtcgtcctcctgcctcttgggccaaggagagtaaggtttcagctcttctctctgtgaggtggctgaaagcagggcccagggcccacacctctcacctccagctggcaccagcgactccagcctcagcagatagcctttgctcagtggaggcctttgggagcctgcctgcaagctgcgtcatcaaccagcctgaatttagacaaagtgctttggggaaaagaaacgtgtggtgtgccttgtttttttccagtaattgttccatggctcgttctgcttgtaagattttccaaaataaggccgtagatgagaattatatcagcacattgggaaccgaaggcatgcggacactgttggcgctttgtaaaaaacacccctcaatcagacagacacacgtcatcgtcgcctgctggggctgggcccagatttcgagataggggagcggcacgtgcccgtttggtacagatgggagccaggaagccctttgctcaggatggaggtctcctctattagggggcctgttacagtaactggtgggcctctggggtaccctgcaattgactttacatatttaactctttgccattgactttacatgtttaactctttaaagtcgacttccttccccctcaagagaacttaatttactcaaagtcctccctgggtagaggagtttggccgggtagtttcagcaagttactggtaccgcttctaggacagcgtctaacagcatctttgggaagatgactgtcaccaaagcagaaaaagctttctgacttgtgtaaccccctggagattttttaagtcccccaccccacccctttccctatttcttacaggagacagactgtgaccagtaccccctgctggattgagctgcacctgaatgggcctttgcagtggcttgacaaggtcctcacccagatgggctccccaagcatccgctgttccagtgtgtcttagagacatcaagtatggtaggggagggcaggcttggggaaaatggccatgcaggaggtggagaaaattggaactctactcaacccattgttgtcaaggaagaagaaatctttctccctcaactgaaggggtgcacccacctgttttctgaaacacacgagcaaacccagaggtggatgttatgaacagctgtgtctgccaaacacatttaccctttggccccactttgaagggcaagaaatggcgtctgctctggtggcttaagtgagcagaacaggtagtattacaccaccggccccctccccccagactctttttttgagtgacagctttctgggatgtcacagtccaaccagaaacacccctctgtctaggactgcagtgtggagttcaccttggaagggcgttctaggtaggaagagcccgcagggccatgcagacctcatgcccagctctctgacgcttgtgacagtgcctcttccagtgaacattcccagcccagccccgccccgccccgccccaccactccagcagaccttgccccttgtgagctggatagacttgggatggggagggagggagttttgtctgtctccctcccctctcagaacatactgattgggaggtgcgtgttcagcagaacctgcacacaggacagcgggaaaaatcgatgagcgccacctctttaaaaactcacttacgtttgtcctttttcactttgaaaagttggaaggatctgctgaggcccagtgcatatgcaatgtatagtgtctattatcacattaatctcaaagagattcgaatgacggtaagtgttctcatgaagcaggaggcccttgtcgtgggatggcatttggtctcaggcagcaccacactgggtgcgtctccagtcatctgtaagagcttgctccagattctgatgcatacggctatattggtttatgtagtcagttgcattcattaaatcaactttatcatatgctcttttaaatgtttggtttatatattttctttaaaaatcctgggctggcacattgactgggaaacctgagtgagacccagcaactgcttctctcccttctctctcctgaggtgaagcttttccaggttttgttgaagagatacctgccagcacttctgcaagctgaaatttacagaagcaaattcaccagaagggaaacatctcaggccaacataggcaaatgaaaagggctattaaaatatttttacacctttgaaaattgcaggcttggtacaaagaggtctgtcatcttccccctgggatataagatgatctagctcccggtagaggatcaccggtgacaactatagcagttgtattgtgtaacaagtactgctcccagcagcaattagggagaaaactagtctaaattatttcaactggaaaaaagaaaaaagagtcctcttcttttcccagccttttgcagaacacagtagacagaactgccaccttcaattggtactttattctttgctgctgtttttgtataaaatgacctatcccacgtttttgcatgaatttatagcaggaaaaatcaagggatttcctatggaagtcctgctttattccaggtgaagggaaggaagtgtatatacttttggcaagtcatacagctcaaatgtgatgagatttctgatgttagagggagatggagaggcttcctgatgcctcatctgcagggtcctgtgcctctgaagttctagccatgaggtttccaggtaggacagctgctccccaagcctcctgaggacacaggaagagacggaaggagcaccttgacagacttgtgtgagtcttctcgaaggagggttgactcagaacccagagacaatacaaaacccctcacttcctctgagagggccaaatgctgtgagtctgaagtatgtgcctggtgtgaaatgatctatggcctgtttcttacacaggaagccccctgaacctcctgtacatgtgttcatgttcccagccagctctgagacccaggaaccaaatattccattttggcttctgctagagcagtcatggttcctctcctaaaagccatgggcagcagtttccgagggcctgcatgatccacctgctgcacgatcctatgagggcttcctgtggcacacagccctctgggtgcttgggaactagcttcaggcacagcctgattctggtgatccagtgatctatggaagtcgtgtcttactccaggtgaagggggaaaaaaaaagcctatactttggcaggttatgaactttgaatgtgatgaaatgacacgtttggctgcatttggatggtgtcttagaaccctcattgctcagacctgaaggctacttctaggagcatgaagtttgagttttgtgtttttccaaaggatacttccttggccctttttctttattgactagaccaccagaggaggatgtgtgggattgtaggcaaacccacctgtggcatcactgaaaataaatttgatcatacctaagaggttaggaaatggtgccattcccaccttagagtgctacataggtgctttgggcgtatgtaacattagtgtccttccttgaagccacaagctagttttcttagttttaaaatcctgttgtatgaatggcatttgtatattaaaacacttttttaaaggacagttgaaaagggcaagaggaaaccagggcagttctagaggagtgctggtgactggatagcagttttaagtggcgttcacctagtcaacacgaccgcgtgtgttgcccctgccctgggctccccgccatgacatcttcaccttgcagcttgtgctgagactgacccaagtgcagctagcactgggacacagatccttgtcttcagcaccttccaaggagccaacttttattccctttcctctctcccctccccacctcgcttcttcccaatttagtaacttagatgcttccagcacatacgtaggtagctaccccagccggtttggattacaggcctgtgctggaacatcatctcagttggccaccttcctggcaggctgtagacctgacattttgagacaagcctagagtcaggagcagggactttgactcttaggaagagcacacatgagggcaaggctgctggcagacgtctccattgtccttatgttgtctgtgttgtatttttttttttttattgaccatggtgattatttttttaaaccatcgttaatatactgaagtgagctatagcacatatcatgtgcttagtttgtttatttttctccatctccccttggcttcctagagtttggacatattccaggctaaatgcttttactcaagactacagaaaggtttgaagtagtgtgtgcatggcatgcacgtatgtaagtaatctggggaagaagcaaagatctgtttcattcttagcctcaggcctcatgagggtctccacagggccggagctcaggttacaccactccttcgtccttacaggagatgtagggagaagaatctgcaggctgcttgtaggactgttcaccaagggggataccagcagcaagagagtgcacccgtttagccctggaccctgtttcttactgtgtgacttggctagagttgggagttcccccaaaataaacgtgtccccattttaccagaaccaaacctcaacacagcgaagctgtactgtctttgtgtggcaaagatgttcccttgtaggcccctttcaggtaaccgtcttcacaatgtattttcatcacagtttaaggagcatcagccgcttctcaagtgggtagggaaagcagaaaaacgtacgcaagaggacatggatccaaaatgatgatgaagcatctcccatggggaggtgatggtggggagatgatgggctaaacaggcaacttttcaaaaacacagctatcatagaaaagaaacttgcctcatgtaaactggattgagaaattctcagtgattctgcaatggatttttttttaatgcagaagtaatgtatactctagtattctggtgtttttatatttatgtaataatttcttaaaaccattcagacagataactatttaattttttttaagaaagttggaaaggtctctcctcccaaggacagtggctggaagagttggggcacagccagttctgaatgttggtggagggtgtagtggctttttggctcagcatccagaaacaccaaaccaggctggctaaacaagtggccgcgtgtaaaaacagacagctctgagtcaaatctgggcccttccacaagggtcctctgaaccaagccccactcccttgctaggggtgaaagcattacagagagatggagccatctatccaagaagccttcactcaccttcactgctgctgttgcaactcggctgttctggactctgatgtgtgtggagggatggggaatagaacattgactgtgttgattaccttcactattcggccagcctgaccttttaataactttgtaaaaagcatgtatgtatttatagtgttttagatttttctaacttttatatcttaaaagcagagcacctgtttaagcattgtacccctattgttaaagatttgtgtcctctcattccctctcttcctcttgtaagtgcccttctaataaacttttcatggaaaagctcctgtgccaggagctcagtctga

SEQ ID NO: 38 - DNA, 54830 bp, Homo sapiens
atgctcagtggcttctcgacaagttggcagcaacaacacggccctggtcgtcgtcgccgctgcggtaacggagcggtttgggtggcggagcctgcgttcgcgccttcccgctctcctcgggaggcccttcctgctctcccctaggctccgcggccgcccagggggtgggagcgggtgaggggagccaggcgcccagcgagagaggccccccgccgcagggcggcccgggagctcgaggcggtccggcccgcgcgggcagcggcgcggcgctgaggaggggcggcctggccgggacgcctcggggcgggggccgaggagctctccgggccgccggggaaagctacgggcccggtgcgtccgcggaccagcagcgcgggagagcggactcccctcgccaccgcccgagcccaggtaaccgcgccatgtcccctccccttcccccggccgggcccgcgcaccccgcctgtggcttccccgccccggggcgggctcccgacgacggcggcggcggcggcggcggctgggagcgcgcggaatcctctgggagggcgaccgcggcggcctgacgagccgggccgggcgggccggctgaatgccgggcggcggtgcctcgcgtccctcgggcccccagctccgcttgcagctcgtgggagaatcaagttaaactcggacgggactcctgccgcggccgccgctcctctttgttgttctcagtagtttcacggtcgccccggctgagcgcgttgggtcggctggaatgtgttgccttagggtctaagtgaaagttgtaaattgtttgtctaaatttattttctccagccaatttctgttttgtctttgtcccctactttctcttcctagtcttgtcatgccagtttacgcttctggctttgatatgtttactttttgagtactgagagtgacagcggtatgcaggacacattcttagcacctaactgaacccctccttgcccccaataaaacatgcttcctaataaaagacacagctgatcttactgttagcactgcatgtactgacagtgaaattggtgtagggtggagggcggtggctccatcacttgtcccaaactgctgttaggatttctcaaactagattttcaaagacacaagtgtgtttagttaacctgaaaggtttatttgctggtgcagaggctttaaaaagccctgttgaagattgatagctgtttcccttcaaaaacctaagtacgtttgtttttatttaaaaaaacacatttatttcccaattagtttcttaatgcatttagtttttgcaccgtagtttaaggtggaattgccagttatttaggaataataaacacaacaggataatagcggaattaccctgaattgactttctgcaaacatataatcttagctaatttttgttagtaacctttgacttttgccagaattagcatccttctagtcttagtagcagcttggttactcgggtgttttaagaagtaggttcactcctttttgctggcaaaaaccatttagtatcaaaaaaaaaaaaatgcgtaatttcgtaattagatttagaacaaggcatttgaataatttttatggtggatttcataaattacttttgccataccctgcagagactagataatatatatttcagttgaaatctaggaagttctaaaatgtaacttttttttaatgctaaggacttactctctctatattggaaagttctgatatgattagtacataatattccaaactgtaaaatgattaacatttaaaaatacggtttttaaaattagtgtttcttccataatgctgtcatgattttgtttacttaaatgggtttgttacagaacaaatgtaatagagatggaccaagcatttgtaattcggagtagctttaggtctaaagacgatggtgaattatgtaggtttaagttgttggaattaaaactaaaagcttcttttgataaaagtcgttataacattttgtgactctattaatagaagtggctttttctttgctttccaggtttttgggcgagttttaaagaagtattgcatcttcgttttttttatttttgaagtgggagtgtatgtttctgtttaggtcactgccttcattgtaaatcttgagtttagaaaaaaccaaactgcaaatctgtttttcagacttaatgaaaatttgtgccgagaaagtcactttgaaatattttggaataagttttacatgaatgattgatcttttatgatagctttgctgtttgaagcaattctccctctactaggaagcagcaaatcttacttttaaaaacctctgcttcactttcttaagctacattttagtcgagcgattgtgtgtgaattctttttctgtattccccttcagtttttctttctccccgcaaattaaggagcgagaattaacctaatttatgctgcccagtcacactccagctctcccacttggaagcagtttttttctgattgagccagtgttatagtaacatcattagacactattctaattgaggtgtgagttactgaggcctctgctagggaggttaaccctacagaatctgtagggttcattatatttaaactgcatatttcggcttgtctaaatttttgcctattttggtgaaaacatgttgttttgtcgatgtttaaacttagttcattttgtccctctctagttcatgactaaccatttttttcatttttaatccagcgatttttttagagtggttctttaagcatcttgtattagccatttcaatggtcattatatatgtttggatttctcttattttgttgaactagaagactgtgtggttacgccccaaaatttttttttgtcttaaagccatgatgaatggggtgactctgaggtgaccattaatcgcgtataaaagtaacctgactaaaatgttttcattgttttctacagttaaaggacttacaccagcataacacagcatttttttttttttttttttttgagatggaggctcgctctgttgtccaggctggagtgcagaggcgcgatctccactcactgcaaaccccgccttccgggttcaagcgattctcctgcgtcagcctcctgagtagctgggattacaggcatgtgccaccacgcttggctaatttttgtgtttttagtagagacgaggtttcgccatgttggccagactggtcttgaacaactgacctcaggtgatccgcccgccttggcctcccaaagtgctgggattacaggcgtgagccactgcgcctgtcctataacagcatttaatacagttttgtaaaattatcacattttgggctttttgttcaacagttgatgaagtctcaattgttttaaaatgagaaattcaaacagttcacaaatatatctagatatattcatttgagctacttgtagaatgatgctgtttgcatatatcaagcatatgcttgatcataagtcagatttagaatttttggattttgttttctctttctaaaatgtgtaattttggtaatgggaaatttgactgaattccagtttctcaggaacaaggtattttaggttgtgtcaccttaacactattacctggtgtaattggcatccgggaacatttgtttttaactatgagagtgaatgaaaactagggtagtgcttacatatgtaaaactaagatggtaggtagtcggattcttacaatttataaggttctcataatctaagccttgatgagttgctactgcaaattatattatagatcagataagtaccaaagaccagttgtaaagagggtctgttaacattttaatcagtttaaaattggcggtaacagtaaagaccgttcagcccaaagactgtatttcattatttatattccaaatgagaattttttgcagtttggaaaacttgtaaatgtgttgaattcatctttttattgcttttttactcccaatgtttagggcaacggtcttttcttctctcctgtctccctccctccctccctttctccctttttcttctttttcttctttttctttttttttttctgagacggagtttcgctcttgtcacccaggctagagtgcaatggtacgatttcggctcactgcaacctccacttgctgggttcaagcgattcccctgcctcagcctcccgagtagctgagattacaggcgtgcgccaccatgccaagctaatttttttgtattattagtagaggacggggtttcaccattttgggcaaggctagtcttgaactcctgacctcaggtgatccacccgcctcagcctcccaaggtgctgggattataggcatgagccaccgcgcccagcctttttttcctttttctttccatcttgctcagtgccccagcctggagtacagtgctgcaatcatagctcactgcagcctctaccacccaggctcaagcaatcccacttcagctgctgcggtagctgggactacaggcacacaccatcacacctgtctaattttttgaaaaatttttgtagagatgggggtctctctctgttgcccaggctggtcttgaactcttgggttcaagtgatcgtcccacctcgacctcccaaagtgctgggattaaaggcatgagccaccacgcctggcaagtagttttcaatcttggctgtacttttagatcccttgaggagctttacaaaatactgatacctgaattctagccccagaaattatgatttggttggtctagggtgcagccaggttagccctccgcagtgattgagtcattagggtcctctgactttttcttttgaactgtttcacttgtgttagctttacattctttaatacagtgttacacacatgtacagtgtagccatctcacacatctaacttaacgggtcttttgaaagtattgccacatttgctttgcttctgtgtctgtctctttcttttctctcccccttcctgtcacctattcctttctcctctgtttctttcttcactttcagtttatttgaactgtctggtagtaagttttaggaagctgtatttcccatgatgagaagttagtatatcatcactattttaaataggaagttgattttcttttaaagtatattctcaaatgcttacttgtactccttttggagactaattactttaagtccccaagttagcatctgaactccctgtgggcttggtctggtggctcacatctataatctcagcacttcaggaggctaaggcaagaggatcacttgagcccaggatttcaaggccagcctgggcaacaaagtgagacctcatctctaaaataaataaataaataaataaatataactcccaatgcaaattgtcttcttagggcgttaatctacttggtaaaccttacattttcaagcccccaattaactagtcacttaactggtttctgagaggcaggttgcattgggctttttctgtcagggcttaattaatacactgtgagacatttgctcagctaggccagctagctagtacttctgtagagatcatctagggcatgttcagctctccatttacatcacctgaagtagttcccaagtgctgggctatggagtagtttcatctctgtctctggaagagctatttaaaaaaataaaaatattttttcccatctgattgcaacacacatgctgcttcagaatgggaatggagtggaggaggcatgggaatctgtgttatttttaaaaagtgcctcttgattctaaaggttttgtttattttggtatgcttatccttactgctttatttatctattttttagagacaggttgcccaggatggagtgcagtaacatcatcatagccctctataaccttcaacttctgggttcaagagatcttgcctcagcctccagagtagctaggactacaggccggcaccaccacgcctggctgatttttttaaaactgttttgtagaaatgggggggcgggggtcttgctttgttgcccaggctagccaaatcttatttatgatttaaaactaggaatgctaccgaatatatatttttatagtaaggtattatttctgtatgttaatatggatgaatgtatgctactcaggtcttttcaagtcaaaatgtatttctaaatataagatgaattaaggatatttgtcagtgatattcactagtgaattctagagcatatgttatcagtagatgggcagtccttgtaaaaattgaataatctagtgaaaggatgaccggaaataatatttaatggggtaagctaagccaggaatcattgtacataaacacattaggtgtgtcttacatcataaatatgcctactaaaactagttgaaggaagaatgtgtatagatgctgaaataatgaaggggctggctaattgtaaggaaaaatgatacaacttctatataattagtctttttaatcagttgcatatactcatgatacttaatttgtaaagtaaagattgtagactagatcaatgctttgtaaaactaacagtacctcagacttccagagtgttttttaaaggtacagccccacccttgattctagttagtggagctggcctaacctgcgggggattttgatacatccccctttgaaggaataagctagatgacttgaaactctgcttcagttaaaagttttatgaaatgaggccgggtgcggtgactcacgcctgtaatctcagcactttgggaggccaaggggggtgcggattacctgaggtcaggagtttgagaccagcctgaccaacatggtgaaaccccgtctctactaaaaatacaaaaattcattgggcatggtggcacatgcctgtaatcccagctactcacatgcctgtaatcccagcttcttgggaggctgaggcaagagaattgcttgagcctgggagacagaggttgcagtgagctgagattgtgccactgcactccagcctagctgacagagcgagactgtctcaaaaaaacaaaaaaagttttataaaatgtatttttcagttatcagttattaaaattcagtttggtttccaccatcttttaaaacagtggttcccaaagtatggtccacagactcctggagatccctaggatccttatatttaaggggttcacaaaatcaaaattattttcataatgaaactgagacgttatttgccctttcactgtgaggacatttgtatgggtggtgaaggagcagtggtgggtaaactgctggcactttaaaatgactctaggcagttataccaaacatatgagtcctcattgtgttctttatagtcaaacacacataagcatttgaaaaaatgccggtttcacttaataatccccttgctgcagcagtaaaaaggtttaattttaaaaaaatctctaccttggagtatgtctttttaatagtgtgattaaatgggaagtatgcataaagcatttctgcacattgaagtacagtgttcttttctaggaaaagcacttgtgttattgagctgcaagctgaactagctgctttttagtgggacaccatttttatttttatttaacaggatgacagataagctcagatagctatttagatttgagtatttggcaggtaattccttggaaatgaataaagtgagctggccacttcgaggagaacatttatagccagtgctaaaatctgatgtttcaagtgaaaatcagatttttgggaaactcctgtcactatgacttgccagtttcttaatacttaaagacttttctgatgagatgggtggtgatattaaggaatgtgattaaaaaaaatatgttgggctgggcacgatgatgcacacccatatttctagcactgtgggaggcggaggtgggagaattgcttttggccaagagttcgagaccctgtttctacaataacatataaaaattaggtgtagtggcatgtagttctagctgctcaggagggtgaggtgagaagattgcttcagccagggagttcaaggctggattaagctaggatcgcaccactgcactcgggcctaggctacagagcgagactgtgggggggggggcagtatgaggaagtgtgtcaacactgggaagatctgtgtaactcattgaaccaatattttcccaaatgaccaattcatgttacaaaatcgtgcatgggtaggcgatccgttcaaagtacaacatagacaaatggatttttatatacaccagagccaaaaagttcactgatacagtgaattccacattgcaactaacctttcagaattgccacttgagttttggtgttgaataaaagatgaatatccattgttttctgagaaggctgttaaaatactcctctcttccaattagctgtccatgtgagacacgttttcttcatgtactttaaacaaaacaacatatcatagcagattgaatgcagaagcagatatgggaatccagctgtctcctattaagctaggcattaagagaaatttgtgaagatgtaaaacagtgttactctgattcctgactttgttttagaaaattctgtttttcataagatgtttatattaacgtaatgggtttattattttaaatgaattaataaagcaaataccaaaaattttagtagttttatttatttataatatgataaatatcaatgtatatagcccgcataaaagctatttggtgtctttaataatgaagagtataaataaaggtccaacttggccaacatgacgaaaccctttctctactaaacatacaaaaattagctgggcatggtggtacatgtctgtaatcccagctacttgggaggctgaggcacgagaatcacttgaacctgggaggcggaggttgcagagagctgagaacatgcctctgcagtccagcctgggcaacagactgagactatgtctcagaaaaagaatatgaataaagggatcctgagatcagagagtttgacagctgctgttttaaagtaactatttctatgcattatcgactaaattactgattgattgaattgtttttatggtttgtactatattgctgttatttctaaggacgttagtcattcagtttctgttcagttatcagggaacatgtaagagtcagacttaagtaaaaaggggaattcattggcttggtctggagatagagctgacctcagattgctatatccagggtttcaagcagcatcaccaggactcttgactttgctttctttctgtttctcaggtagtttgcaggctaactatccccagcttcaaggaagcatgaagagggccttcccccccccacccccccacccccccaccccccgtagttccatcggaagtgctagagctatgtcacttgcctgccttgcgttctttttcatcagaaacaacactgtggccagggggtggctctggttagtctgggaattgtcccacctggccagatggggagattctccttggaaaatcagactgctgttttacaaatggagaaatacatgctggtacacaaaaactgatgtccacctatagtactttgttatttcttcttttaacagcctttaatttattaatccaaaaagggtaatttttaaataagatcatttaaactgaaggtggcataccaaaatgacatttaagacacataggtaaacaagaagcatacatctcgatttgtcctttgtcattcatcttaaaagttaaaaaaaaactttttgttgcttttattgctgtataaatgtgctcttggaagttcgccaactgccctcagtttgaagaacctcaacttgctgtctaggatttagtctttagcttgtgctgcagacagttgcactaaccgtgaacacctttttttcctgttggtaaacctaagtttagagtttattcctagtaataacattgatatattaccaggcccagcttttttctcctcccctagttaaatttaagcacttttgcgccgggcatggtggctcatacctgtaatccagcactttgggaggccaaggcgggcagatcatgaggtcaggagatcgagaccatcctggccaacgtggtgaaacttgtctctgctaataatacaaaaattagctgggcatggtgatgcgcccctgtagtcccagctactggggaggctgaggcaggagaatcgcttgaacccaggaggcagaagtggcagtgagccaagatggcaccactgcactccagcctgggccacagtgaaactctgtctcaaaaaaaaaaaaaaattttaagcacttttctcaaatattcccatagtaagtagtttattgatcactgatcaaaacacttacaacttctagaaaatacatgtttgacacatataatacagttaattcaaaagtaaactaacatctgagaaaaaatgtcaacactccttacctaaaatacatgaatttacatgagaacctctctctggccagtattcagcctgtttaattttagagagtatcttaattagtttggttatttggctttctcgtccatttattagtatacctatggtcaacgtcaggtgacagcttacaattaatagcaaggctagaggaaaaacaacaggcagataacaagaatcagctgtctcttcttgctaactctttacctctcataactcttgactgcatctaatacctgtatatgttagtgcctttcagataggcctaacttctcatctcttcaaactcaagatatctaaagctgaatttgttacatacctgcttttaaattttttaatcattgagttatctagaaatgggtcgtcttttatttgtcccccctttttcacccttcatatttcagttggttaaagactccagtcttttctacctagaaatagctcactgatttccccctcccctccttggcccattgcccatgccccagtctaggatcttaccgcttttctggtaattgtttcctaactggttttctatttccttttccaaagctgttctccaggctctcactgaagttttctaatacaaatctaatgctgttttttctcctctttctaccatgaacctactctagacaaagctcttatccgtctctgcttttcctcatcattttccttcagcctggcaaattcttattcgtatgtggtaatccattaatactattctaccaatattctgatggctgtcccctggcacatggtagtattgtgcttctttgtctccctcatccctaccttgaaattaggcatggcccagagtttcttgcattggcactgttgacattttaggctggataatttattttgcgtgttgtccagtgcattgcagggtatttagcagcaaccatggcctttagccaccagatgcccagtagtatccagttgtgaccatatattgcctccagatgttgccaagtgtcccctgagggacaaagttgcccctggttgagaactcctggcatggccttatgactttggccagtcaaacatgagcagaagtggtagcctttaaaagaagatatatgagctgtcctatcccttctcctgccatttaaggacatatgtagaaatggagcctttgtcagtctaatttctgagcgatgacagcagtgcccccagttgatctgtgatgaatgtgtattatatcctaagcagaaaataagcttttgttttaagctactgatcttttgggggttggttgtcactgcagcatagactagccaatcctgactgatacgttgtgccaagacctaggttacctatgaactttccatgctccctcatttatagtcccaaatcactttatacctacttcttttagcatttattacttatgtaataatatgtttgggtcttccagattagtagttctcagtggagtaagtactgctctttaagggatgttgtagaaatttgtggatgggtttggtggattggtggccagggatgccatcctgcaatgtgagagacagcgaataattatcttgcatcccacaagactttcagatgccccagaaattcatgtaggaggaaaatataattagcccagaacctaactctataatatatattcactttgccaggagttaaatttcttttaattcatttttttcttgcctgcctgcctccctccctccttccctccctccctccctccctccctccctctctccctctctctttctctctgttttctttctttttccttcctccctccctgcctccctcccttacttcaggctctgttacccaggctggagtgcagtggcgtgatcttggctcactgcaacctctgcctcccaggctcaagccgtcctcccacctcagccttctgagtagctgggactataggcatgtgccaccatgccccactaattttttgtattttttgtagagaggaggtctcactttgttgccaggctggtcctggcaaccgtgcctttgttgccaggctggtcctgagcttaagtgatccaaccatgtcggcctcttaaagtgctgggattacaggcatgagccactgtacccggacttggttgttttgttttttatttttgagaccaaatcttactctgtcacttgggctggagtgcagtggctcagtcatagctcaccgtagccttggtctcctgggctcaagcagtcctcctgccccagcctcttgttaattcattttcttagttcaagttgtttaagagttcaccatttgggaaaatccatgttactgactgcagtgccattgtgctatttgagttgccagtataacacgtttgtcttggaaggtctgaatttgtagctgtcacatttgtaatgattctgtatataagtgctagcatctaacttctttattatacattctaacttagttggcatgcctgagtatttataggtggaagtacacattatatattaagcttttcctcctttttgttatagttagggcattgttaaattttcaaaatatgtttaagtagtttagaattttgtttcagtaaagctaaggtggtgatataaattatttgttggaaaaaaaatgggatgttggtctgagagagtccagacccactttcttactatgggcttcctgtttttgtatctgtagtgctttgtatatacagtgtttgttgaattggtcaatttatgtttcccacatttcttttatgtacgttgttgcatctaattaccacaataaatttgtgaagttgtcagggcaggtgtttccattttatagatgagagaattgagagagatgttaacattcagtcatgcggctagacctttaattagaatatataattttatttatatcgatattatgctcttgcctaccatacttccataatctagaaccatttaatgtaggaatacatctctttattcctgctagtattattttttatatgcataacttttaattatgtttcaggcacttgtggtcataggaatacaataaagagagagatgagaaagctgtttgtttaagaaagcgaggtcattatcatttgtattcaaagcaacttggtattaaaacaaactttgagataccgttaaggccccagcatagcataaattttagaaatgatgacatttgatggtgagattgtggtgaaatagttaacacttaaacattttaattgcattgtagattcatacacatcttttggaatataatatcagaaaatgacttcaaaagtgtctgcactcttctaatttgttgtaagacaattccacagaataaaaagctatggtcagtccagaaacacttgcctggtatatgtcaggaactgtgcatggtgctgggaatttctaaaatgagagtgttgttgctgttttcttggatttctaatttgtggcaacaatgtgagacagatatgtaatcaaataactaatgtgttacattgtaatttacacatgtaatttacaattaaattgtaatcgtaattgttaaattgtaatttaacgtatctttccttttccctctttcccgattcctttcctttctactgagtctcactctgttgcccaggctggggtgcagtggcacaatcataactcacagcagccttcaactcctgagctcaagcagtcctcctgcctcagcctcctgaggagctgggactacaagcccacactaccatgcctggcgaacctcctacatttttttagacagattttaatagaaaatgcagaaaaatgcgtaatgcattttaggaaaaatcttcttgtaaaactattattatttttttgagatagggtctcactgtgtcacccaggctgtagtgcagtggcacaatcacagctcaccaaggccttgacctcccaaggctcaggtgatcttccagtctcagctccccgcgtagctaggacaacaggcgtgtgccaccacacccagttaatttttttattttgagtaaagatcaggttttgccgtgttgcccaggctggtctcaaactcctgggctcaagcgatccacctgcgtcggcctcccaaagtgctgggattacaggtgtgagccaccgtgcctggccacaattaagcatgttaatatttcaacagtagcttttttactgaacactatgtatcagacacgttatgcagaatttttcctttgagcttctgtataccctccttttaatccagattcagagtaacttcattttctgactactatgaaaactggaattctaattcaaatctcttgactccaaaatctcccatgcaggttatctttggttatttggaaagtgtaccttcagcatgtgtattaatgtgggcaagtgctctaagacatatgaaaaactgcttctctgcatggggtttatgagttgagacagacatttatgtgaaagagataacaacagagggaggagcaagtcttcaatatcaggtgattgatgtacattctgaagaggctcaaaactacaacagtggcagggagaatgggaggagagatagaaaagactgaggtaaagaatcttgtaactgtaacggaatgtagggatagtgaaggaaagaggcacgtcagagatcttttgcaaagcttcccaaggctaggtaattgagtggaattgatactttaacaaaggtcttcagaagaggaagagattttggtagaatgatgagttttattaatcttgtgggaggatactttaaggattcaagtatgcagtaaaagaaaatgaaagcaagataagtctggaatgcaacttcagtgaacaaataaaatacaaacaagcacacaaagtacaggctccagtcctgctttatcttctttattcttaagctaatggccttttcctattctctgtggggtcttgggatcagataagttagttttctacctgttgaatggattctttattaatcttcagtttttgttattttaatttttttgaaaataatttaccctgctgcttttacaggtaaaatcttttgaggaatttagtgatctctttaaagaacagctgtattgagatataatttccataccataaaattcactatttgaaagtgtacaattcagtggtttttactatagtcagagttgtgcaaccatcaccattatcaatttttaggactttttcattataacaaagaaacaccatacccattagcagtcattcctcattccccttcctcccaggccctggcaaccactgatttactttctgtctctgtggatttgcctattctgtatatttcatataaatgggattatataatgtgtgaccttttgtcactgacttctttcacttagcatgtgttttcgaggcttatccatgttataatttgttagtactttattcttttttatggttgaataatatttcgttgtatggaattttatctatgcattcatcagttgatggacatttgagttgtatccattatgaacaacgctgctatgaacattcatgtacaggtttgtgtggacatgggttttcatttccctcaagtagaagtgtgaagagtagaattgctgggtcatatttactctgtttaacattttgtattaataccagactgttttccaaagtacctgtgccattttgtaatcccagcaccaaggagtgagggtccaatttctcggcttcttcaatacttactattgtctttttgatatatccatctcagtaggtatgaagtagcagctcattgtggttttgattttcatttccataatgtctaatgtcgagcatctttcatgtgcttattggccatcgtctttggagaagtgtcctttagaatccttttgttcatttctaaattggggtttttttttttttttaattggtctcttttaacaaaggtgagtgttaactgctaggtagaatttcataccaggcgatggtaaatttttcataaatattagtaatagacttttaggtttaactagtgctgatcctcataagtaatcctttaaaaaagtgctggtaagattttcctttagggtgactagtaaagtcagtaagacttgattgagcatgccactatcataatgagaagacctaactttaatatttttggaatgtcaaaaacagtgacattttaattaagtaattttatttttaaaaattatttttaatggctaatattttgtaagaattttaagtaattttcaactctgagcatcaaattttaattatgtgcattgaatctctgacttaaccagagcaatttcatcttttcccaagtagtcagatctacttcgtaaaatgtgttctgatgtgtgtcttttttttttttcttttttaggttatcctgaatacatgtctaacaattttccttgcaacgttagctgttgtttttcactgtttccaaaggatcaaaattgcttcagaaattggagacatatttgatttaaaaggaaaaacttgaacaaatggacaatatgtctattacgaatacaccaacaagtaatgatgcctgtctgagcattgtgcatagtttgatgtgccatagacaaggtggagagagtgaaacatttgcaaaaagagcaattgaaagtttggtaaagaagctgaaggagaaaaaagatgaattggattctttaataacagctataactacaaatggagctcatcctagtaaatgtgttaccatacagagaacattggatgggaggcttcaggttagtcttataagagtttttctataccctctatggtggcagatttaaaaacttgctacgtttcctttcaagctactacagggtaatttaatttgtgctccatctcttcagatactgtgcatcctgtacaaatatgcattatgggaatttctggaagaatatgcaaaagataaaatcttaaagttttttaatgttctactcagaaaaatgttcaatggagaaaatttggaaaataaaaataaaaagcagaaaacccacacttcgcaagaactacctttagcactttggtattcatttttgtagcctgttgttttcttttttttttttttcctagacggagtcttgctctgtcacccaggctggagtacagtggcgtgatcttggcccactgcaacctccacctcttgggttcaagcaatcctcctgcctcagcctcctaagtagctgggactacaggcaagtgcaaccatgcctggctaatttttgtatttttagtagagatggggtttcaccatgttggtcaggctggtcttgaaccgctgacctcaggtgatccacccgcctcagccttccagaattctggcattacaggcgtgagccactgtgcccagtcgtgttgttttcttttttgatattgtatgtacatttaaacaaccggattacacttagtccttttataatttagaaatctgatatgtttcactgttagcaaatgtttcattggtcacatttttcaggtagaacttcataatacagctcccttgcttaaataaatcttacagaaattttgtcgtagattttaaagttttatttcaagactttacacatagtttctgcaacacagtctttttgcatatttatttattttattttatttttttgagacatggtcttacttttgcccaagctggagtgcagtggtgcaaaacatggctcactgcagccttgacctactgggcttatgcagttctcctgccttagcctcctgagtagctaggactacaggcacataccaccatgcctgggtaattttttattatttgtggagacaagggtcttgccatgttgtccaggctggtcttgaactcctgggctcaagcgatcctcctgccttggcctcccaaagtgataggattacaggtgtgagccaccatgcccagtcactttttacatttttaaaacctgagcacaggccttgaaattataccaaggtttaaattctaggtctgatgtatgacatggccaagttagttattgtgaattttagttttcttatttatgaaatggggattgtaatactgagttggtaggattgtgaggattaaatcagaatatataaaagtgtcttgcataatgtgacacatgaataaatggtcgtttatttttctaggtggctggtcggaaaggatttcctcatgtgatctatgcccgtctctggaggtggcctgatcttcacaaaaatgaactaaaacatgttaaatattgtcagtatgcgtttgacttaaaatgtgatagtgtctgtgtgaatccatatcactacgaacgagttgtatcacctggaattggtaagtagactttgctttcatcctaagaaacataaagggaaaaggatctcaatagtgtttcaatttttgtaagttaaattataaatttggaagatagcccgcgactttaaataaggttaaagaatcagacatttttaatatacgtatttaaatttgaatttaggaacaaacttatattttgactgctaaaaccgagtattgtagttgatattttgcccctttagaacattgtttttgagaaataagatggaaagcattataaatttgaatacttagttatgtattgttagatagcgtttatgctacttctgaattgaaatggttcatgaacttttgtaatctttggtttaaatttacattctctgtttttaaatggaaaatactttcattgtaatgattaatgtttcatttgttttcccctttaaacaattaagatctctcaggattaacactgcagagtaatggtaggtaatctgtttcttactactttctctttgttttgtcctatcctctctgtttttttgttgacctagaattagtttgtgtgagcggcaggcagtaacattaacaagaaaataacttactgctttggaaatgtagattttgaggttaggggcatttaaaactggatttaaaactggatttaaattggctattgctctttgtatttgaactgcaatttatgaactaaagtactgtaaaaaaatatgatagaggaatgcaccaaaaacaaatataaagaatattttttgagttaagacctatttttgaagaaaatctcacagagccagtttaaatggatgttaaatacccagaatatttggtaatttggaatcacatataacatatcctttaaaaataccagtattctaattttccttcatttcagcctaacatttttatgaatgataatgttgagaatggtttaaaattgcactcttttgtattttttcagtcttgttacattttgagtaaataaatcaaggctactttaaagcatatgcccatcacagcttacctaattgtatttttaaaaagaaaaagtgttttaaggtgagaaaatgaaatgtgaatgggggtgtttttgttttttattgtaatatttgagaatggagttttattaaatctttagctctgttacttagaacttaataaactaaaatttctgtaagaactaattaatttgcagagaaactcttataaagaaccactgtcagccaggcacggtggttcacacctgtaatcccagtactttgggaggcttaagcgggtggatcacctgaggtcaggagtttgacaccagcctggccaacatggtgaaaccctgtctttactaaaaatataaaaaattagccaggcatggtggcgggtgcctgtaatcccagctactcaggaggctgaggcaggagaatcgcttgaacccgggaggtggaggttgcagtgagctgagatcacgccattgcactccagcctgggcaacgagcgaaactgtctcaaaaaaaaaaaaagtggggggaggctgggcacggtggctcactcctgtaatcgcagcactttgggaggccgaggagggcggatcacgaggtcaggagatcgagaccatcctggctaacacagtgaaaccccgtctctactaaaaacatacaaaattagccggacgtggtggtgggtgcctgtagtcccagctacttgggaagctgaggcaggagaatggtgtgaacccgggaggcagaggttgcagtgagccgagatagtggcactgcactccagcctggttgacaaagcgagactctgtctcaaaaaaaaaaaaaaaaggaaccactgtcatcttagaaaggtgtgctcttgttctggagggcagttagtagtagtttagcaccttttttgtttgtagaattttagaggtgggtcagaaatactaggtgaccttaaccaaaatttaggaagagtatgcaattctacttgtttttttttttccacctttctcccatatcactggtaatggaggaagactcactgccttgtggtgcttgttagtgattagtaggtttctgacaagtgtgggtttattattaggagctgttgtggtggtctgggaagggttgctttaagattggtgaaaactctgcttctttgctacgcagacattgatattgtatcacttctttttttttttgaaagtaaacacgtttcatatcttcaccattttccatccatgtttttggagaaaacgtttgtctcagtgggtattaaaggttgggagactgcaatgataagtgtgtctgaatctctctatggggctgtttgtgagggggttcaaattctgagtgctcatcacacacctcccctattctaaaattattgatgcactgttattgatgggattgtacgggttgatagcctttctatagtgactgtagggctgtattcagccttgtagatccccctagtggtggttttgtaaaggctgtcttcagtgtcttatttcctcagaaaacaactggtatttctcacagctccttctagatttggacaaaggaatgatacaagagcaggtaactaaaagttaagaaaatgggacagttccttcatttttgagttaaagtcttgtggtaatcatttccagcctatcttttacctttcatgaaactttctatgaccacgttgacctgtgtattcattttaacaagtatttaataagcatgtattgcctggtactgtgttaggttccagggatgcttagataataaggtatgttttgtctactcaagtgagcttatactctagtggaggagagaaaaagtaaataagagagtgataataccatgagataggtgctgtgtcctggttgctggtgatgataaagaacacagacctaaggtgggcccagtggtttcagcttttttgtcacctatagagaatatattctttgaccctcttagaacattttttttttcttttttgagacggagtttcgctcttgttgcccaggctggagtacaatggtgcgatttcggctcactgcaacctccgcctcccgagttcaagcgattctcctgcctcagcctcctgagtagctgggattacaggtgcccgccaccatgcccagcatttttttttgtttgtatttttagtagagatggggtttcaccatgttggccggctggtctcgaactcctgacctcaggcgatccacccgtctcagcctcccaaagtgctgggattacaggcatgagccactgcacccagccctcttagaacattttataatcactatatatatgtataactactctaaaaatatggttaaataataatagctaacactgggtactcgtgtgtcaggtcagactgagctaaatgatttctgagtattgtgtcatcattctcatgatacttctacatgggaggtgggattatttatactttaacagatgaagggactgctacctggagaggtgaaggaacttgcccaagaataggcaactaggaggagccggagtaatgtgtgcttgctattagatatttaaacaatggaaaaatattacaaaagactgcaaactccatgacagcagggatatttgttttgtttatggatatatcccaagtactagaacagtacctggaacagaagtgctcaagaaatattttttcagtgaatgaatttgttgaatgctagcccataaagagaaatatttaacagtttggtatctgtttttctggactttaaaaaatatatactatatgtttttttaattttatttttttgaataggcaatacatggtccataaatcaaaatactataaaaaggtatacagtgaaaagaagtgctcccacccctgcccccattcccccctacctcaggtaatcactttttttagtttctggtgtttccttccagggtttctatatgcaaaaaatacatacctcctttcttacacaaaacgtatactatgcatactgttctggaccttggttttttacttacagtatatgattttttaaacatgcatatgatcatagtgtacaatagtgctttgtaacttgctttgattctcttggcaaaaatatattgcagacttctatccttgttgatacctttagttttacctgagaaacatttattatggattatctggggttaaagagatctgtagaccagtagaagtttcaaacttacatttgggaagtttagccagcatatttagggcaagaaagatttatgggtcataactgtttaaaagcagaatacagttggtacataaagatgttatgattgctgattaaactgaagagtcatctgaaaagcaaaagcagtgagtaccaagttgaccagttgtatcctcaaatcagctagcaaaaccagtaagttggtaaaaagatcccagtcattataacaacaaaaaaaacctaagatgtccaggaattaattagagatgtcaggatttatatgaagaaaatcattgaactttgttgaagggtgtaatataaggctgaataagtgtagacataccaattttgtgccccaaacaatttttttctttttattatttttataacttggccaatgttgatgagtggttgtgttcagttttttttattgatacataatttgttacgcatccttttgattatctttttgtttccataaaatttctaaagaggaactttggaatgggatttataggtcttcagaatatcatcttcatgacttttgatgcatgaacatacttcttaagaggtttttaagaggttgtacatagaaacttgcacaatggatgattattactgccttaaactagtctcaatttaataaaaagtacccatgtaacttaactgatatttacatgtagtagattttttttcaaaggttgacatagggaaagataagggaaatgatatgctggttcttaatgaaaaagggaatgtctttttgtggtctactaattgactgctttaagaagagaacctactgttagttcagtggattgttaagttctggagtagtgttagtttagaagcaataaaggattggttgctaaaggtaaaaagcaaaccttaaaacaataacctaaaaacaaatgggaaggttctgggcagagaattaacattgttaatgcagttcagtttcagttttctttttgtcatacagcagagctaactatttcctggttggttaatggaaagatgttatgctgtatcagctggaatctagctttgcttatgaaggtgtaatcacataggtgaaagatgttgattactgagttttctcacaccatatattaatcaaatactcttatttgggttgggtttctagagggaaatttcagtttgacttttcatttataatttttccgtttggttctaaacctataggggacattacattcagtacacttcatttttaaagaatatgttgcttaacaataattctagatcctgggattggatatctatcagatcccactcatatctccacagtgtgaaattaacaaaaagatatagttaaatactcagtctctatttagaccgaataattgtttttctcagctggacacattttccagccattcggtttttgcctgccttatgtatttaggtgattattcttctaggtttatcaagaaactgaggagtacctttttaggattgttgctggaggctgttgaaacatagactagcttcaaatttgagagtcagattgattgataaaatatatctcatgctgttaccgctgaataaatgacttttgctggtaaagtagtatgcttttaaaataatatgaaaaaattctgaattaaggttagtaatttacactgtaattgattttaggtgttattatattacttgctaataagatttttttttctgggaatagaagcttataaaaatttaaaatatgtttaattttctatatagctccatcaagtatgatggtgaaggatgaatatgtgcatgactttgagggacagccatcgttgtccactgaaggacattcaattcaaaccatccagcatccaccaagtaatcgtgcatcgacagagacatacagcaccccagctctgttagccccatctgagtctaatgctaccagcactgccaactttcccaacattcctgtggcttccacaagtgagttctagaatcagatgtagtcagcaagttgagttttcctaatcattgcttatttatgtgtagtcacttggggggaaactccaagtaagtaaacattaaaagtaactgtagtatctttcataggtaaacaggtattaaacaggtatgcacaatcacttggaatttaagtaatggctttgattataatattgatttaaattaatgatctgatttatactttactattacatgtagcagtaagtagcctcttaagctcccagatatattttggagaaatatttaaataattaacaagtagttttgatccaagatgtttatgaaggtctgtgttaatggaattgcaacctttcttttaatgcggtgttcttattttggtttttctgggacaatattaccttatagtagttgtctgattttctcactgtgcaaagggatcttgacaaatttgttatatattgctcaagatagacattaattaagtcaattttgatataagctaacttctatatctctttttaaaatatatgtgtaattaaaaaaaaaaagtgtttcagaaagatccttcttttctgccatgtcataggagggagaggggctgctaggttcaggtttttgggggcatgatcatatgacctggttctgttacttattttcacagtaaccaaaggtttgatagtttgctgcttggcaaatgaagtagcttttttttcattttttttttttcaattaatcatagagcattgtcttggcatgtgtatggtgttagttgcatgcagttgctaaaggaatttatgtaaacccacatcagaatagatttttgacagctctgggctaatactgtgttagttgctaccgaaagtaccattattgtatttgctttactatcagattagattcaacatagaaattttgatctttggaataaatgggggactgatttctgtaattgtgagttttcaagtgaagtataccagaatttcccctttaattcattacaccacttcaaagcaacatgtttttggtttgctatctaagagatgacagtctcactataggcagcatattctaaatgggtcatataggttaagcacttgagaacccagttccttaatcacttggtgcttctattatctgtctactttttatttaccaaattaggaatatggttgacaaacagtgggtagtgatagaaaataaaagaaggtacattatagccacttgaacgtagattagtgctagagcacagctacctacttctgtttatattatctggagattgaatttctgtgcctttgtcaatgcttactaaagtgacttcattttgactgtgttgtttcctgaggttgaatcctattcaaagattagaaaaagtgatagaaatgaaatgcagctaattttatcctggtatttattgggtagattttaataatcgaataccgtaaatactgtaagttttagaacttgtgtcaaaatgttcccttatgtggtggcatgcgcctgtagtcccagctgctccgggggctgaggcaggagaaatggcgtgaacccgggaggcggagcttgcagtgagcagagagcgagtcactgcactccagcctgggcgacacagcgagactccatctccaaaaaaaaaaaaaaaaaaaaaaaagagggttcccttaggtctcaaaaagtatattgatgaaaagaagttgaactaaaatagaagatttgaaaggctattttacgtgagctgatttagtcgtattgtttaactttattttacatacttagaattgtataagggaagtattcagtatggataactacagtgagtcactttacaatttatgttcttttgacacctgaatattttaagaatttccttttaaatacctgtaaattaaaataatttatcctgtgtagttaatgacaatttttgtaagttagctaagagtattgcctgtagaattgttaaaaatatgaacaaaaccataattaacctttaaagataacttgcagaatctgggggatgagtaggaagggaggttgctaaaatgtcatttttacagataaataatttggggagtattgaaatattctctttagcttttggttttgtaattcttagctttaaggaaatgtgatatgtaaagaaaagaaaaatattccttttctttgatactttgagcaatggtgacatgttactctcttccatctgattatactcccatttagaaaagaatgaggtgatgccagttataaataattataactttagtgctttccaaataggattaacagtcgagttaattaatgctctttaagaaaccaaatttccactttaaaaaaaaagccttaaaaatgtaggacagtaagcaatatcataggatggtttttgaatagaatacaagccaagagaagcttgattctcttggtatattacatacagagagggcaattaatttcttgtacatctgggaatatgatggtgttcttgaaaagaaatgattcttggtttataaaagctcttgaaaaaatttgaaagtagactgatagtttttttgtttgtttttaaccagtaaatggtatattgattggacagcagagctagatctttttaacttcctcatcttcactatcacatcctatttaaaataattttctgctctgcttttctctgtcaaaccctagcattctgccattactagtatcagtgctgatagtgattaatttttcagttttcaacattttcttgagcctggatttttggggtcctaatcagaaaggtccagagagagaggtggatggagtggccaggatgaactgacatacctctgaagaagttaatatgataggccagacgtacagtggtgttttgctggcatttgaaatatgtttgtgaagaaataagccactacaattagttagacattacctaaaatggaataattttgagcttcctcaagttaaagtttgcctttatagatgactgtaggttttttacctgataggccatgggtgagttacactttttgcccatctttatagttgtgcattatcagataaaattggtccttcatttagtatatgaaatcataagatgacatctatgaatgtaccatgttaatgtcttcttgttcctctaggtcagcctgccagtatactggggggcagccatagtgaaggactgttgcagatagcatcagggcctcagccaggacagcagcagaatggatttactggtcagccagctacttaccatcatagtatgtacatactttaaaaaatcttttaaatagttgagaaaaaagtaggcagcctttataaaagcaaattaacccatgtgggccttaatttttagacagcactaccacctggactggaagtaggactgcaccatacacacctaatttgcctcaccaccaaaacggccatcttcagcaccacccgcctatgccgccccatcccggacattactgtaagctcttgtttttgttgtaagggctattttttttttttttttggtagggctttgttttctgttttttaaaaatgtttttacatcttttattcatcctgtgattttgtttcattaaatagtgcttttcagtattttttgtaaacagtattatttttcatagttatcctacctttttattttagaggagtgatgtttgctaaatacatttatttctctgttgctaatgtttcattaacatcacattgatttccattcatttgtttgtttgctttgtatatgttcttagatctcatctgtgtcttgtatatccacgcataatggattgaaaccctttgagtgctaagttctcaaggtttccctcagcgtagtattcagtgtactttggataatgttgaatctatagataactctgtgctggcatgattgggaggaataccctacagataacatgtagtttcaggtagaataggagcattgttcatatggcttagtaaaatcgagagtataactcttatatacattaaatccctttcttctcattataatattaatagtaccaaagaaaacttagaaaatatagaaaagtataaataagaaaagcaaaattaccctgaatcctgctactcaaaaacagccacttctaatattttgttattttccttccagtcatataaacaggtatatgtaaattgacaggggctcctactctatgtgtattgtatatatcttgcttcttttcagttatgttactattttttccatttcttaagagaatgtaatttttaatggctgcctaggccgtcatagtgttgaagggtgctgggtttggacctttaacaggctgtgtgaccattgacaagttatttcacctcattaagcctcaagagtaataatagtagtatctacctcaaggggtgttcgtaagaagtaaacgtaataatttatgtgaggtgtttagcacagtgttttaacacattaccagttttcaattatgttagctatgattccattaaataaacatccttaattaacataagcacttgtttttagaatagacctaacagtttattattatacattgcattataaattgtactgtattggacgttacatgaataattcatttatgatctgtattaaatgttggatataaaattatgtgtaaattgtgtaataatagcacttggcagatagcactgaaatgttagttattaaatatccacaaaagtattaatagtttaagactatttgcttattgtaaacttttaagttcttagacattgcataagcttgttttaaacaattcctaacctataatagttatatttaagtaagatttactgaaagttttagcattagacaacttttagtaaataaaaatggaatttttgttgtcttttctttagggcctgttcacaatgagcttgcattccagcctcccatttccaatcatcctggtaagtgtatttcaaaattgatttcctgtatttagattgatttagtggtgattgaaacgcacaaacacaggctttaatggaattatggggtcacttctcagatgagtacaatactcatcatgacatgagttaatcaacagtttgagtagtcaatatagtcacacatagactgtctatattttattcagtttaactgtccccaaaagaaaagaactatcttttcagctaaaatgagaattacagaaatgctgacttcagcattgaatacataaatatgcagcagaataaaactaggtttcaaaatagaacagctgtaaaactatagcttaaaaagccaggaaagaatcttaagtacatgccgaaaagaaaaataattcactctattcaggatctctggttaactggaatttagaaactatttgattaaattgtatgcaaaagagtaaatcgctaagtagctttcttcagttcaaagtttgtgtataatttttgaaactgtagaggtaataaaacagaaaacacttgaaaataaaatactgaaagtcccttgtaacacaaacatagattttgaatttttttctcatcctttcgtatctgtttttcttagcataaaaagatgcaaatatattacttcagctaatcaccttaattttttggaaactataaactcaattttcctcctaattaaaagaaaattatgaagaattatatttttatttttacttgtttatttttgagagagggcctggctctgttgcccaaactggagtgcagtggcatgatctcagattactacagccttgacctcctagtctcaagcgatcctctcacctcagcttctagagtagctgggactataggcaagggccaccatgcctggctaatgtttgtattttagtagataacagggtctcaccatgttgcccaggctggtctcgaactcctgggctaaagcagtcctcctgctaataattttatttatttatttatttatttatttttttccgagatgggatctcgctatgttgtccaggctggtttcgaactcctagcctcaagtgatcctcctgtcttagcctcccaaagtgctgggattatagacgtgagccaccacaccaagcttgaaaaattaaaaaaatatatttttaaatgattttatttttgatctttgtgggtacataggagatgtatatatttatggggcacatgagatgttttgatacaggcatataatgcatgataatcacatcatggaagatggggtatacatcccttcaagcatttatcttttgtgttacaatctatactctgttagttattttaaagtgtacaattaaattattggctacagtcaccctgttgtgctgtaaaatattagaccttattcattctaactactttttgtactattaaccatcctcaccttcccccaatcccccactacctttcccagcctctggtaaccatccttctactctctgtctctatgggttcaattgttttgatttttagatcccacagataagaacatgtgatgtttgtctttctttgcctgggttctttcacttaacataatacctccagttctatccatgttgtctcaagtgactgaatcgcattttttttatggctgaatagtactccactgtgtataagtcaagcataaagaattttaagcataccggaataatacaggaagttcccccattgtactcattcctcagtttcagccattatcaagtaatgaccaatcttgtttcattcatactcactctctttcttcattctatattattttgaagcaaatcctatattagttttatatgtaaatatcttagtatatatttccagtaaaggtttttaaaacataaacacagcgcccataatgattaattcaaagggtcttaaattcttaaataggtctacataattttctttgtgtaaatgttctgttattgattatgttggtttaatttttcttctagctgtttaaaaaaatagaagggaacatctttgtgtttataacttttctcatattttagtttaagaaatttgtagaatttctagatcaaaaggccatattacagtgacaccagagtgtgagaaccagggttactgtgctggctagcagtagatgtcatagtttaataaactttttgctgatttaagaggcaaatacttgttctggttagggaaaaggtgatattagtggggcagaagcattcttttaacgatatatatttattatcttctgtaacggattttctgtgttacattgtgtgttgtgattttaaacatttttgtaggtcaaggggtctagccttttcataaactttctttttttgagaaatgtaatatacagaaaagtatgtaacacaagtaagtatatagtctaacatcactaaaaccaatactcatgtaaccactacacagattgagaactaaaacattatggcatcccagaaaccctcctaccccatgaattttgtctctgtcaaaacctctttccttctccccagaggtagctactgtcctgctttttatggatatcactttttttttgctcttttatttattttttaaatttttatttatttattttgagatgaactcttgttctgtcacccaggctagagtgcagtcatgcaattcggctcactgcaacctccacctccaggttcaagccattctcctgcctcagcctcccgagtagctgggattataggcacccgccaccatgcctggctaatttttgtattgttagtagagatagggtttcaccatgttatccaggctggtcttgaactcttggcctcaagtgatctctgccccatcggctcccaaaatgctgggattacaggcatgagccaccatgcctggcccttttaaagtgatgaatacatccctaaacagtctagtaatctggctttacttgttttttttttttttttttttttttgagacggagtctcgctctgtcacccaggctggagtgcagtggcgcgacttggctcactgcaacctctgcctcccgggttcacaccattctgcctcagcctcccaagtagctgggactataggcgcccgccaccacgcccggctaatttttgtatttttagtagagacggggtttcactatgttggtcaggctggtctcgaactcctgacctcttgatctgcccgcctcggcctcccaaagtgctgggattacaggcgtgatctaccgtgcctggccctcattttctttttacctagctttataaatacttgtttaaaacaatttaacatttggactgattgtgtaaagaccacttttaagtgttgttactgttttttgttgtgttttttttggccaccaaaacattgggtaattgttgtcttagacaatctctgtagttttggtttaaccagtgtacctatcagttgtttgctgaagcttcttgtccatagcataatgtgataccttcacattacattttctatagacaatatatatatatttttttaaatttttgagacggggtctcactctgtggcctgggctggagtgcagtggcactctcatggcccactgcagccctgacctcccagacttaggtgattctcccatctcagcctcccgtgtagctgggactacaggtggacacaaccacgcccagccaatttttctatttttcgtagagacgcggtttcaccatgttgcccaggctggccttgacctcctgggctcaagtgatctgcccatcttggcctcccaaagtgctgggattataggcatgagccaccatgcccggctgaaaataatttcataaatacttcaaaactggctttttaagaagacactcagtgaagacacttagtgtatcactggtttttatgttctaagcataatgaaatatatgtaaacaaatatttatctttgtgacaagttcattagagtgacatggcaaaacatttgagtttttaagtttttgaattatccaatcttcatgtgatctgttttgataactcctcattgcattggaaagtattttattgcttggcagcattttgaaaagtaattagggtacatagcttttacaagttgttttcttttaaaaaaattttaagcatcaatcatacttcattttaggttattttttttttttccgtaagatctgggtttcttttttgtcattctaagtaactttgttgaaagtaagattgttgaaagttttattgcttcaaattctagtttaaagttcataaacagcttattgagatacagataaatctttcttttaaatatgtcgaacctatttccaccctggggtctttgctttcgcttcctctttgaaatctgttcagtcttcacatagataaaaggttattcaggtcccatcttttcagatgggatgtcccctaccatccagtctgaagtgttcttcccaatcatctgctgttccataccctgttttattttcttcacagtgttcattgttatctgagttatttcatttgtttgcttatttgtctgcccctgcacctctgtgagaacagggactgtagctgttttgttttctactgtgtatgcagtgcctagaaagatccctagatactctgtagatatctgttaaatgagttaaaacaggaaagccaaataatttttatgtatttgggcttgatgtaataattgttgtttacaaataaaaattagaaatacttgatcagttgtctttgtaaaccagagtagcacctcttttttcccagtgatttaaaattatatattattgttcaaatgagtacactaaatacatctccaaagttaaaattgtggtagttaacatgacctgacttcactaaaaataccttttgctatggcataggtgggacaaatgaccttctacccaagagacagttgagaatctgtgtgtacaacaactgtgtgattagagtataattaaccttaactcagggatgggatagctgacttgcttatgcactttctctcaattagggaatctataaaaatatgtcatgagtcgatgttattcaaggacagttccctggaatacatcttagggtcagtgtgtttttaaaaaataaaagttgagactacatagagaatatgtgtagtcaaatgaaataccatggtaaaataatttattttagattctgattatttctgttctttaaattctcagttgacctggtcctttgaggtaagaaccaaattccagattttaaaaaatgacttttagaacttgaggataagtggtaattggaaattaaaaaaaaaaattagtgttttaagaacagtgctaagtactgagctagaaaatagaagacatggaaattcctaccttttaatgcattatgttattttaatccagttgttttgggtgcattacatttccatctcccctccctttaccctttcttttaggaaaaactgtgttgtggagtgcaagtgaaagccttatatctttctcatgggaggatgttctttcccatttatttcctatagctcctgagtattggtgttccattgcttactttgaaatggatgttcaggtaggagagacatttaaggttccttcaagctgccctattgttactgttgatggatacgtggacccttctggaggagatcgcttttgtttgggtcaactctccaatgtccacaggacagaagccattgagagagcaaggtattgattgtatagtcagatagttactttaaaaaattgagcatagtacattgtcttttattcaaggttatgttttcccatgtacattatatgtgttcttaaatataaataaaggaataaaggtcatgttgaaaactcagaatttgtaagcactccatcttaattgtcggtgtttttgttgtttaacatataatgataaaagatagccttttttatgttagtaggtttctatgtttcgaatagtaagtataccttttgaaattcagtttgaaaattttattttctgtgatcatacatttctacaaattactgaaaggaagtaatattaaatgagaacatgtttctgaaagttttacttataatgttaaaaaaattggtaataaaagggaaatggttaagtaaattatgataaatttttccttttttatacagtcattaaaatgtttaaaagtttatataatgaggctgggtgcggtggctcacacctataatcccagcactttgggaggcggagtcaggcagatcacttgaggtcaggagttcgagaccagcctggccaacatggtgaaaccctgtctctaccaaaaattagccatatgtggtggtgtccacctgtaatcccagctactcaggaggctgagacaggagaattgcttgaacccaggaggtggaggttgcagtgagctgagatcgtgccactgcaccccagcctgggtgacagagtgagactccatttcaaaaaaaaaaaaaaaaaaagtttatataatgaaatggaaatgcttacagtgaaatattacaggaacattccattttagctactgtatgatctcggcttttaaggatgtgtgtgctaaagaacataatcttggctctatcacttgctgtcatgtgactttggcaaattacctaacctctaagccattctgcctaatagaattttctgtgatgaagaaaatgatttatatttgcactgtccagttcggtagccactagccacatgtaactattgagcacttaaattatagctcacttgattgactaatcggatttctaattagttttaatttaatttaaatagtcacatgtggctagtggctatcaatttggacagtatgccttagtttctttatctaaaaaaattagaataatagtacttgttgagttgtaagggtttaatgagaattcatactacatgctcctgacacatagtaagtgttgtaaatatgtgcatcattattagatatgaacaggaaaagaaaaaaggaaatatacaaaaatgttaatagctatcttttggttttatgtgatctttatttttaatttttcaatattaagcatgctatacaatctgaactaaaatttaatttaaaatacttatcaagataaaatgtaatttcttttttcttcctaaggttgcacataggcaaaggtgtgcagttggaatgtaaaggtgaaggtgatgtttgggtcaggtgccttagtgaccacgcggtctttgtacagagttactacttagacagagaagctgggcgtgcacctggagatgctgttcataagatctacccaagtgcatatataaaggttagttacaattttatttgaatattttagacttaaagctctatttgttgtcaaaagaattgaaatctgggtggaaggaatggaaaaatgttttatatattaaataataagaaattgtgtttaagtataaaaaacacattttctgagggcatttattgacattatcagtaatctagttttatcgttgccaatttgttacattttgttttttattttatttatttatttatttatttatttttgagacagagtcttgctctcgtcgcccaggctggaatgcagtggcgtgatctcggctcactgcaacctgcgcctcctgggttcaagcaattctcgtgcctcagcatcccaagtagctgggattacaggcacatgttactgtgcctggcaattttttgtatttttagtagagacggggtttcaccatgttggccaggctggtctcgaactcctgacctaaagtgatccgcccaacttggcctcccaaagtgctgggattacaggtgtgaaccactgtgccaggcctgttacatgttttagagtaatacaaaggctcttgaaaatactgagtgaagcctccaaagttgtattcctgtaacttgaaatttgtaagaatcagactctggactttcatcttagccaatcttcaggattttatggaagagaattctaaaattaatagcttttcaaattaagaacctgataagcctgaaatatttttcactagttatatattcaacctgtttgaattttactttataatataacctgtttttgaaagagaaaggcagttgtaattagatagcctaaatatatttttaattgtgtgtcatcctcaacattttcattgtcagtgattgtaaattggtagaattaactgtgtctcataacttattaccaggaagttgcttaggataaaaataatgtagccccatagcatccataaaaatggaattgcctgattacctcacaacagcaaacccagtttctcatttccagttatagttcagttaaagaatgttggaatttttttatatgacacttttaaacatgccaagtatagcgaaaataataaaccacatgtacctatcatccagctgcaacaattatcagcactttaccaatctttaatgtgtttctcccccaacttttttttcctggagtcgttgaaagccaattccaaacagcatagtcactcataaaatatttctgtgtgagtaactcataaaatactcctgtgtaactcacaaatctatacagacttctgaaaaacataatcgcggtgctatttattacacttaataaattagcatcaattccctgttaaaattttcaacaatagagcatcagttatagtctgttagaacaatagaataaagcaataaagtattatatttattgataggatatccatgtgtatagaaaagttagttattaaacaatacataaggcctgatttagtggctcatgcgtgtaatcttagcactttcggaggccaaggttggaggattgcttgagaccaggagttcaagaccaacgtaagccacaaagtgatacccccatctctacaaaaaaattaaaaaattagctgggtgtggtggtgcatgcctgtagttttagctacttgggaggctgagatgggagcattgcttgagcccaggagttcaaggctgcggagagccatgatcatgccactgtgctccagactaggtgatagagtgagaccctttctcaaaaataaataaataaatagacaatacatagactatgatctcatttttgttaaatgatatcatgatatttgttatttgtttatatgtacccataagtctagactggtatgtataatggaattgtctctatgaggtggaaattatttgtattttgcagtttttttccacaagtaatttctgtattggttatttatgctgtattattattatttttgagacagagtcttgctctgtcacccaggctagagtacagtggtgccatcttggctcactgcaacctctgcttccagggtttaagtgattctcatgccttagcctctccggtagctgggattacaggtgtgtgccaccacgcctggctaatttttgtatttagtagagacggggtttcaccgtgttggccaggctggtctggaactcctgacctcaagtgatcagcccaactcagctcccaaagtgcaaggattgcaggtgtgagccactacgcctggccttttgttgttattttttaatggctttggatttccttatatgttttgtagtccattttgtattcgtgggccaagtttgttttgagagaattcactcattttattatttattttttcttcctgtcattgcttcaccctatgtggcaattttgccttaccctggcatctgggattcacatctcagaaccaaatcttataaatttaggaagtagggggactttgtctcctgaggaaattgagttccattctgcaggtatgcttggggcctaattcctgattgcctagatttctctgaaacttttccctgccgtgggcaaatattttattcctaggtgtacttctgaattggctgtattttaccagcacttgatttatgggcaggtgcccacttgtagcccccagagagtttggctgttgtctctctccatattattccaagaagtcaaattcctgttccctgccctttgtttatggtcttggtatacccctagtacctcctatctttagtctctgctctccactgtgggttttatttatcatcagtttggatgtatggattgtttccatatgaatttcatgatcagtttggagaggatgactattttaaatagtttttctgttatttgtatgtggttgaagcagagagagaaggtgattatgtatacccacttaacccatcttgactcagaagtctcttgttttatttatgtaatttaaagtgactggatagagaactatggtgttgaatatatactgtgtgccagatagtatttataaacttaatcagatatggagtagtatttaaaacaattgagcttaaataatgtggaatcgtgcaagtgtaatttcttggatgtcaaatagatacattgtgacttatttatattttggtacagatggcctttgaaaagcccccaaggtgtgagacaagtcatcacttgataaaccactgtcttggacagatcttaatagtgatctcatacttttaccatgaaaagtagataaataccttgttggacaagatatttggaatttaaaaaaatctcatttgtgtatattaactaagattttaaaataattatgtctgtttaccaagtatattactgttctttagaagagtcttactagtcagaaagagacagttacaagtacaaccccatccacaatttcactttccatggcttcaggtatccatggtcaaccacagtccaaaaatattaaatgaaaaattccagaaacaattcataggttttaaaatgtgcgctgttctgagtagatgatgaaatctcactccattctgcttgggatgtaaaaccttttgccagcatatccatgctgtctacattacccacccattagtcactgagtagcgagctcagttttcagattgactgtcatggtctcacagtgcttgtcatccagtaacctttatttagttcataatggccccaaagtgcaagggtaatgatgctgggatattgttaacattgttctgttttattattacctgttgttgttaatctcttactatgcctaatttgtaagttaaacttcattatgaggtatgtatgtataggaaaaaacatagtatatgcacagtactatctaaagtttcatgcatccactggaagtcttggaacatatcccccatagataagggaggaatactgtataccttaaaatttaaccattggcattttcttcattcgtttttttgggtagcagtaactaagggatttgtaagttatcagattttcacaggagatgatattattggggtaaattgtatgtagatagcatgcacccctggaaggagtgcccacactttgagtacacaaatgtgtgcatgcacatacacacacacacacatacacacacacacacacattcccctttttaattaaaatgaggaaaacacacttggagagccataatttcattttataagccaagaagctaggactaaattgtggtttttttcacccttctaagttgactttttttcctgcttctctcatgacatagtagtcattttttacttaacgaaaatctgatgtaatgaaatgacattttacaagctttaaatgaagcaaatgtttgaattctctttaagtggccttgttcttttgctttcaaaagtaaaatatgttttgttttgtgttatttagcactgggcgtttcaagtttttaatagctttattgagattttgagagagaattcacatgacatacaagtcacccatttaaattggacaattcaatgattgttagtatattcacaacattgtgcagtcattactactcaattttggagcattttcatgactgtggaaaaaaactccatatacccttttaactatcacccccaaatctccatttccattagctctagacaaccactattctacgctctttgtagatttgcctattcagggcattttatatagaagagaattatgtaatatagtcttttatgacttacttcttttcactaagcataatgtttcaagcttcatccatgtagcacataccaattcttcactcctttttatggctgaatagtgctccacacacattttgttcatcagtttatccattgatggacttgatttccactttttggctatgttatgaaggatactgctatgaacatttgtgtataagtatttgtgtgttttcatttctcttgggtacatacctaaaagtggaattgctggattgtaagataactctatgtaaactttttgagaaactgatagactgttttacaaaatggctgcaccactttacattctcactagcagggtgtgagggttccaatttctctacattctcatcagtacttgttatctgtcttttttattttagccattgtagtaggtgtgaagtataatcttattgtggtagttttgatttgcaaacttcctgtgttaatattgagttgggtttgtttttgaacacatttattttagaggaaggggcagcagatgcttctaaaccactggtggactaggtcagagggtattatgaacctcatttaaatttattcccaattaacactcattgtgattccctaagtcaagtagaacttagaatgtccttagcacaatcttgtttatgttcaggtgcatttttcattctggattactgtttcctaatgttaatttaagattatatagtattgcatttaagccttgtcaaaggaaaatggcaaaatttgactcctggttgtaaaagacaatatcctaaagatgttgtcagtgatctttatgagacacacatctttgttaagtaacggttttgtaataaattcagaaaacatggttaaataaattaaagcagaaattagctcaggagtggtggtcagaaatattttttggatctgagccaaaaagaatatttaaagcctttgattactttgaattgcctttgtcaacaatttagtcaaattatgaaaggaagacagtagcatttcaataatagctttaatttttatcatccagtgtaacaaatggaatctgttatggtatccgttatcaatggattagttacagtgtgaagtcaggaggcaatgcaggttttagttattagtgaacctaactgaataattttaggtcttctggtttgagtgctataattacgtaaataatctgtggaagggaggtttgctgaggtgcccaatgaatcatttttactgcatctacagatgcaagtcataaagtttaatccgtgtgggtaacctgtaatatgtgctgctgatgttagcatagattcaggctgaaacaatcctaattgcgattatttacaacacattggagagagcctatgtgtgacatattacttggttatttttttaaatgactcgtgggggtgggggagtgttaatgttaaaggcatacttgaatcttggagattataattaagttttattccctactcccagataacattatatatatatatatatatatatatatacacacacacacacacacacacacacacacacacacacacacacaccatacttggttagtgatgattaaaaaaaagtagttgtggagacctaaatgtaaaacacaaaactataaaacttctagaagataatataagagaaaaagtgagaactttttttttgagacggagtcttgctctgttgcccaggctggagtgcagtggtgccatcttggctcactgcaacctccgcctcctgggtttaagggattctcctgtctcagcctcccaagtatctgggatcacaagcttgcaccatcatgcctggctaatttttgcatttttagtagagatggggtctcaccatgttggccaggctggtcaggaactcctgacctcaagtgatcctcctgcctcggcctcccaaagtgctgggattacaggagagagccactgtgcctggccaagagaaaaagcgagaacttttaagatacaacatcaaaggcatgatccataaaggaaagaattgataggcctgacttcattgaaatgaaacacttctgctctgtgaaagacagggtcagagaatgagaagacaagccacagactgggtgaaaatatttgcaaaagacacatctagtaaaggactgttatccaaaattacaaagaactcttaaaactcaacaataaaataatgcaacaataaaataaacaatgggcagaatagactgggcatagtgattgactcctataatcccagcacttcgggaggtcaaggtaggaggattgcttgagcgcaggagtagttcaagatcagcctgggcaacagcaagacctcatctctaccaaaaaaaaaaaaaaaaaaattagccaggcatggtggcatgtgcctgtagtcctggctagttgggaggctgatgtgggaggacccttgagcccaggtgttcaagactagcttgggcaacatagcaagaccccatcttaacaacaacaacaaaaaaggcaaaagacatgaacaaacacctcaccaaagaagatacacatatggcaaacaagcatatgaaaaggtgttcagcatcataaatgtgtacaaacccatagaatgtacaacaccaagagtgaacccttacgtaaactgggttttgggtgataatgatgtgtcagtgtaaattcattgattgtaacaattgtgccactgtagtggggatgttgatagtggcggaaggttgggtgtggggacagggactctgtactttctgcttaattgtgctgtgaacctaaaactgctctaaaaaagtaaagtttattaatttacttctttaaaaaagtggttgtagagctatttaccttttcaaatgtttgagtccctgctttgttctgtactgggtaatgccttccaaatgtcatagcctagaagttctgaaacgaatggactgtgagaaatttgaggaagtagtggtttcacttctgggtgttgtgggctttctgatttctagaacctgactttgtcatgctttcttttaaatttaaatttttttgtggagttggggtcttggctggtcttgaactcctgggctcaagtgatcctcccacctgggcctcccaaagtgctgggattacaggcatctgccaccatgcccctgtcattgctttctttactaaagtattttaggacctaatagtccaggaaatacatatatgtatattggacaaattcatgtctgtttaaagaatagggtagtctgagtgttgtccttcattggtgctaattgggaaaagttttttgaggaaatggacactgagtagagaaataggagtaagtaggagtgcaatttgttatttggagagtgtatgttattgtatgtttttgtggttcatgtaaataccatggttgaagatgatcagaattttttcaagcatctgaaaattatggtttaagttctaaaactattgtttatcatcaactaaaaaattatgcattctcagatttctcttattttcaagattatttatgcttgcttgtattgggccccttatgtacgtaatgggactttaaaaaatattcatgtccttttagatagggagtatagccacatggttcagaaattaaagtgatttaaaaacagtggacattgagcagccttgcttcagaacctgtccttgttctcctttcctgcaaattctttttgtgtaatcttccaatgctttttaaaaatgcaaataaacaaatattttaggaagatttttttttccccagaaaaaaaggtgatgtgatttattatctgtaatttgttgcatattaaaagaacattccagtactttcataaatataagggtagatatggcaaccccttccttactatgccagttcttcacttggttgataaaagtaaaattatttattaacgccttaactcatcctgaaagataaatgactacgggggaggctaaaaacaaaataagtaactgtatactatgccaagtttgcaacaacctcatgaaagtatgtacacttagcattcccattttatagataaaagaaactcagcccatataattagcaggtatcggtgatgggatttaaaactgggccttttttttccttaaaaattatgaacatttacaaacaaagaaatgtagagagaaactaatgaagtcccatatacccatcgcacggattaagtagttacaattttatatttgtttgatctagtctttttgttgttgttgtttcttaagtattttaaaacaagtcctggatattattttgcttctatttgcttaaagtacgcatctctgaaaaatgttgatctctcttatatagcgacagtgccattttgttaaactcctccaaataagcaaaaatgataagacaaaaagttggccaggcgaccaaagctatcaactccagcctaaggaaaattcagcaatttgattatgaaagggggagggggacttcttaattgtacattttacacagatttccacaaggacagtaatagctgacccacttcgaactagataaaagatacagaggcgtgtggcagccaaagccatcatgatgttgacatgatcttcttggtgagctccaagccacctttcctaactagttttagaccaatcacaatgtacataaaagtttacatgttttaattaattcttttcatgtgagaggtataatgaaactgagttttaaataagtcaggcattggtttttaatgtatggaatttttctttatgaactcatagtatgaaatgttttttcttaaaaggtctttgatttgcgtcagtgtcatcgacagatgcagcagcaggcggctactgcacaagctgcagcagctgcccaggcagcagccgtggcaggaaacatccctggcccaggatcagtaggtggaatagctccagctatcagtaagtatgcttttcattcttttttaaaggtataatagttgatatttttatcttgatttactcagttgattagtttctttgagcagtaatagaaattaaagtttttttttactgggatgatgacatttttgaattggtaaaatctgttcttctgtaatagttgctttttgcctatgaccctgtttgcattctttttgtatcaaaaatggagtatgggatgaaggagaaaggggatgattattatattatactgttctatctcctccttttttgttgatgcttattataattctgcctcaccagccagggtgggttgtaatcactgaagtgcttggctttattctagtaaggaaagcatatttcaatttcagaattggacacttttccaattttttttttaaagtatgctaaacatggagagaaaactaagtgagggtggtattttgataacttgtagacttttttttaattttagggtaaaattgaactgtgtgccaggtttcacactgatggggaattttttactgcagagttaaactcctgactatagacttttatgatggaaacacgtggcacccatcttccacgtctgaaggcataactagtgattcattcaacccctgttcttaacctcttcagtgtggtaagcaaatcacactggctaagaaaactgcagtggccctgcaggtttctctacagtacatgcaaattcctcccattagtttcattgtaatattgatgaatgcagatggactatatgactgtatgttctgactggaaaattagatgcagtctccattgtgacttatgttcaggagtttacaatttagaggtagattaggcatattcattgagagaatttgattttttaaaatttggggtgataccattaatttgctggtttcagtgttataaacatgcttttactgaagaatccagaactattattaagtttcatattctcatcagttgccaccactgagtaatagtgtattactctgttacactttgaaattgagagagagacttcatctcggtcatctaagaggtcttagtggaactaagaatattaactgcttcattattagttatgtcttattctgaactaggctgtttagacagtaaggtttttagaagcaacctgtggacacgcactacctcttaaaaacaagttgtttcttatcccttcacctccacttctaaagaaaaaaataggtgaggtgttggtggattgtggtaatttactttataattggttgtagctagaagacacatgtgaaatgtaaagttccttaaccaaaagtgtgcagcttgttgataaagtttagatctactgttacttcttggcactttagcagagaagttatatgctgaggagaatgaaatacagaaagctggtcacttgattaatttagaatgtagggaggatgggaagagatcaccctgtccctctgatgtcttccaaatcttttctgttaggtctgtcagctgctgctggaattggtgttgatgaccttcgtcgcttatgcatactcaggatgagttttgtgaaaggctggggaccggattacccaagacagagcatcaaagaaacaccttgctggattgaaattcacttacaccgggccctccagctcctagacgaagtacttcataccatgccgattgcagacccacaacctttagactgaggtcttttaccgttggggcccttaaccttatcaggatggtggactacaaaatacaatcctgtttataatctgaagatatatttcacttttgttctgctttatcttttcataaagggttgaaaatgtgtttgctgccttgctcctagcagacagaaactggattaaaacaattttttttttcctcttcagaacttgtcaggcatggctcagagcttgaagattaggagaaacacattcttattaattcttcacctgttatgtatgaaggaatcattccagtgctagaaaatttagccctttaaaacgtcttagagccttttatctgcagaacatcgatatgtatatcattctacagaataatccagtattgctgattttaaaggcagagaagttctcaaagttaattcacctatgttattttgtgtacaagttgttattgttgaacatacttcaaaaataatgtgccatgtgggtgagttaattttaccaagagtaactttactctgtgtttaaaaagtaagttaataatgtattgtaatctttcatccaaaatattttttgcaagttatattagtgaagatggtttcaattcagattgtcttgcaacttcagttttatttttgccaaggcaaaaaactcttaatctgtgtgtatattgagaatcccttaaaattaccagacaaaaaaatttaaaattacgtttgttattcctagtggatgactgttgatgaagtatacttttcccctgttaaacagtagttgtattcttctgtatttctaggcacaaggttggttgctaagaagcctataagaggaatttcttttccttcattcatagggaaaggttttgtattttttaaaacactaaaagcagcgtcactctacctaatgtctcactgttctgcaaaggtggcaatgcttaaactaaataatgaataaactgaatattttggaaactgctaaattctatgttaaatactgtgcagaataatggaaacattacagttcataataggtagtttggatatttttgtacttgatttgatgtgactttttttggtataatgtttaaatcatgtatgttatgatattgtttaaaattcagtttttgtatcttggggcaagactgcaaacttttttatatcttttggttattctaagccctttgccatcaatgatcatatcaattggcagtgactttgtatagagaatttaagtagaaaagttgcagatgtattgactgtaccacagacacaatatgtatgctttttacctagctggtagcataaataaaactgaatctcaacatacaaagttgaattctaggtttgatttttaagattttttttttcttttgcacttttgagtccaatctcagtgatgaggtaccttctactaaatgacaggcaacagccagttctattgggcagctttgtttttttccctcacactctaccgggacttccccatggacattgtgtatcatgtgtagagttggttttttttttttttaatttttattttactatagcagaaatagacctgattatctacaagatgataaatagattgtctacaggataaatagtatgaaataaaatcaaggattatctttcagatgtgtttacttttgcctggagaacttttagctatagaaacacttgtgtgatgatagtcctccttatatcacctggaatgaacacagcttctactgccttgctcagaaggtcttttaaatagaccatcctagaaaccactgagtttgcttatttctgtgatttaaacatagatcttgatccaagctacatgacttttgtctttaaataacttatctaccacctcatttgtactcttgattacttacaaattctttcagtaaacacctaattttcttctgtaaaagtttggtgatttaagttttattggcagttttataaaaagacatcttctctagaaattgctaactttaggtccattttactgtgaatgaggaataggagtgagttttagaataacagatttttaaaaatccagatgatttgattaaaaccttaatcatacattgacataattcattgcttcttttttttgagatatggagtcttgctgtgttgcccaggcaggagtgcagtggtatgatctcagctcactgcaacctctgcctcccgggttcaactgattctcctgcctcagcctccctggtagctaggattacaggtgcccgccaccatgcctggctaacttttgtagttttagtagagacggggttttgcctgttggccaggctggtcttgaactcctgacctcaagtgatccatccaccttggcctcccaaagtgctgggattacgggcgtgagccactgtccctggcctcattgttcccttttctactttaaggaaagttttcatgtttaatcatctggggaaagtatgtgaaaaatatttgttaagaagtatctctttggagccaagccacctgtcttggtttctttctactaagagccataaagtatagaaatacttctagttgttaagtgcttatatttgtacctagatttagtcacacgcttttgagaaaacatctagtatgttatgatcagctattcctgagagcttggttgttaatctatatttctatttcttagtggtagtcatctttgatgaataagactaaagattctcacaggtttaaaattttatgtctactttaagggtaaaattatgaggttatggttctgggtgggttttctctagctaattcatatctcaaagagtctcaaaatgttgaatttcagtgcaagctgaatgagagatgagccatgtacacccaccgtaagacctcattccatgtttgtccagtgcctttcagtgcattatcaaagggaatccttcatggtgttgcctttattttccggggagtagatcgtgggatatagtctatctcatttttaatagtttaccgcccctggtatacaaagataatgacaataaatcactgccatataaccttgctttttccagaaacatggctgttttgtattgctgtaaccactaaataggttgcctataccattcctcctgtgaacagtgcagatttacaggttgcatggtctggcttaaggagagccatacttgagacatgtgagtaaactgaactcatattagctgtgctgcatttcagacttaaaatccatttttgtggggcagggtgtggtgtgtaaaggggggtgtttgtaatacaagttgaaggcaaaataaaatgtcctgtctcccagatgatatacatcttattatttttaaagtttattgctaattgtaggaaggtgagttgcaggtatctttgactatggtcatctggggaaggaaaattttacattttactattaatgctccttaagtgtctatggaggttaaagaataaaatggtaaatgtttctgtgcctggtttgatggtaactggttaatagttactcaccattttatgcagagtcacattagttcacaccctttctgagagccttttgggagaagcagttttattctctgagtggaacagagttctttttgttgataatttctagtttgctcccttcgttattgccaactttactggcattttatttaatgatagcagattgggaaaatggcaaatttaggttacggaggtaaatgagtatatgaaagcaattacctctaaagccagttaacaattattttgtaggtggggtacactcagcttaaagtaatgcatttttttttcccgtaaaggcagaatccatcttgttgcagatagctatctaaataatctcatatcctcttttgcaaagactacagagaataggctatgacaatcttgttcaagcctttccatttttttccctgataactaagtaatttctttgaacataccaagaagtatgtaaaaagtccatggccttattcatccacaaagtggcatcctaggcccagccttatccctagcagttgtcccagtgctgctaggttgcttatcttgtttatctggaatcactgtggagtgaaattttccacatcatccagaattgccttatttaagaagtaaaacgttttaatttttagcctttttttggtggagttatttaatatgtatatcagaggatatactagatggtaacatttctttctgtgcttggctatctttgtggacttcaggggcttctaaaacagacaggactgtgttgcctttactaaatggtctgagacagctatggttttgaatttttagttttttttttttaacccacttcccctcctggtctcttccctctctgataattaccattcatatgtgagtgttagtgtgcctccttttagcattttcttcttctctttctgattcttcatttctgactgcctaggcaaggaaaccagataaccaaacttactagaacgttctttaaaacacaagtacaaactctgggacaggacccaagacactttcctgtgaagtgctgaaaaagacctcattgtattggcatttgatatcagtttgatgtagcttagagtgcttcctgattcttgctgagtttcaggtagttgagatagagagaagtgagtcatattcatattttcccccttagaataatattttgaaaggtttcattgcttccacttgaatgctgctcttacaaaaactggggttacaagggttactaaattagcatcagtagccagaggcaataccgttgtctggaggacaccagcaaacaacacacaacaaagcaaaacaaaccttgggaaactaaggccatttgttttgttttggtgtcccctttgaagccctgccttctggccttactcctgtacagatatttttgacctataggtgcctttatgagaattgagggtctgacatcctgccccaaggagtagctaaagtaattgctagtgttttcagggattttaacatcagactggaatgaatgaatgaaactttttgtcctttttttttctgtttttttttttctaatgtagtaaggactaaggaaaacctttggtgaagacaatcatttctctctgttgatgtggatacttttcacaccgtttatttaaatgctttctcaataggtccagagccagtgttcttgttcaacctgaaagtaatggctctgggttgggccagacagttgcactctctagtttgccctctgccacaaatttgatgtgtgacctttgggcaagtcatttatcttctctgggccttagttgcctcatctgtaaaatgagggagttggagtagattaattattccagctctgaaattctaagtgaccttggctaccttgcagcagttttggatttcttccttatctttgttctgctgtttgagggggctttttacttatttccatgttattcaaaggagactaggcttgatattttattactgttcttttatggacaaaaggttacatagtatgcccttaagacttaattttaaccaaaggcctagcaccaccttaggggctgcaataaacacttaacgcgcgtgcgcacgcgcgcgcgcacacacacacacacacacacacacacacacaggtcagagtttaaggctttcgagtcatgacattctagcttttgaattgcgtgcacacacacacgcacgcacacactctggtcagagtttattaaggctttcgagtcatgacattatagcttttgagttggtgtgtgtgacaccaccctcctaagtggtgtgtgcttgtaattttttttttcagtgaaaatggattgaaaacctgttgttaatgcttagtgatattatgctcaaaacaaggaaattcccttgaaccgtgtcaattaaactggtttatatgactcaagaaaacaataccagtagatgattattaactttattcttggctctttttaggtccattttgattaagtgacttttggctggatcattcagagctctcttctagcctacccttggatgagtacaattaatgaaattcatattttcaaggacctgggagccttccttggggctgggttgagggtggggggttggggagtcctggtagaggccagctttgtggtagctggagaggaagggatgaaaccagctgctgttgcaaaggctgcttgtcattgatagaaggactcacgggcttggattgattaagactaaacatggagttggcaaactttcttcaagtattgagttctgttcaatgcattggacatgtgatttaagggaaaagtgtgaatgcttatagatgatgaaaacctggtgggctgcagagcccagtttagaagaagtgagttgggggttggggacagatttggtggtggtatttcccaactgtttcctcccctaaattcagaggaatgcagctatgccagaagccagagaagagccactcgtagcttctgctttggggacaactggtcagttgaaagtcccaggagttcctttgtggctttctgtatacttttgcctggttaaagtctgtggctaaaaaatagtcgaacctttcttgagaactctgtaacaaagtatgtttttgattaaaagagaaagccaactaaa

SEQ ID NO: 39 - DNA, 81519 bp, Homo sapiens
cggggcggcggcgggggccgggggggcccgggcgcgcgggagcgggagcggccgggggagccggagcgcaccatggaggcggcggcaggcggccgcggctgtttccagccgcacccggggctgcagaagacgctggagcagttccacctgagctccatgagctcgctgggcggcccggccgctttctcggcgcgctgggcgcaggaggcctacaagaaggagagcgccaaggaggcgggcgcggccgcggtgccggcgccggtgcccgcagccaccgagccgccgcccgtgctgcacctgcccgccatccagccgccgccgcccgtgctgcccgggcccttcttcatgccgtccgaccgctccaccgagcgctgcgagaccgtactggaaggcgagaccatctcgtgcttcgtggtgggaggcgagaagcgcctgtgtctgccgcagattctcaactcggtgctgcgcgacttctcgctgcagcagatcaacgcggtgtgcgacgagctccacatctactgctcgcgctgcacggccgaccagctggagatcctcaaagtcatgggcatcctgcccttctcggcgccctcgtgcgggctcatcaccaagacggacgccgagcgcctgtgcaacgcgctgctctacggcggcgcctacccgccgccctgcaagaaggagctggccgccagcctggcgctgggcctggagctcagcgagcgcagcgtccgcgtgtaccacgagtgcttcggcaagtgtaaggggctgctggtgcccgagctctacagcagcccgagcgccgcctgcatccagtgcctggactgccgcctcatgtacccgccgcacaagttcgtggtgcactcgcacaaggccctggagaaccggacctgccactggggcttcgactcggccaactggcgggcctacatcctgctgagccaggattacacgggcaaggaggagcaggcgcgcctcggccgctgcctggacgacgtgaaggagaaattcgactatggcaacaagtacaagcggcgggtgccccgggtgagtggccccaggcctgggagctggggaggatgcgcttggggtgggggccccttctggactacaggctctggtctccgaaggctgggacctgtgcttctgccgtgccccatgtctccagtcttcgctttgttttagggaaattcagagtgttccgactggcagggccagagagtttggtaggaaggccctcctgcccgttccccaggacgagcctggagtgcgggctgtggcggtggggtggggggccaggcctggtgtgtggggaaggcccgcaggcccacaggcattgcccagataggaaggcacaggcctcatgctcccgagaaagcggcctgccccaggtcagggaagttaggtccagctgggccacggcccggatgcctcaggcccaggtctttcttggggttggggtgaaggtggctgtcctcgccccgaaggcacccagcctcgaagacggagggctgcctgcctttgggccccaggagacagagcttgggtgaggcgaggcctggttttgttactggctcccgctccctgtttggtgccttgaagttttgggacacagacacaaaatgaagccaggtgtccaggcttcagtggcaggggcccgagacttggcggctccagcactgtgctggttggtctccctgggcctgccagggaccaaatcccagagtccgccgtgtggggtgagggccatttggcacccggctgaggggcctggtcagcaggctcctgggcccgcgtgctggagttactggcggcctgcgatttgctttggactcacccatttccttctctccctctgaaacgcagaggggtgcgccggagagggaggctgctggcctggctttgttgtttgccagttggaggatctatgggatccggcatgggcagctcccaggccacgaggtgccgaaattactcagtggggtcctcaggaactttccgttgcgtacctccccaagtatttgtaacttttcttttaaatatccaggcttattaaattgcacacacagaatgctgcattggctcagctattcttgggaggcctaattaattcagctattgcatcaaactttttttttctaaatctgtgaatagatgctccagcccggttttctctgggcgcccctccagcagagtgtcagatcgtggggaggaggggctgtggatggaagcgagggactgtcgcctctgctcggagggggctgcggagggtgcatgtgtgtgtgcatgtgtgtgtttgtgtgtgcgcgcttctgaccctgccaggccagggctcaggtggcagccgcctgcagacctgtgggctggggaaggatgctcgtggcagagctgcagacagacgtagcaggctggggcccttcgtgtcacacggggagttggttggggtgggcccgatggcgctccctgtgggctggggcctttctttttggggtggccgcaccctcgtcagtgcctgtggctggaggaagccacatgtcgggggggattgtgggctcgtgcaggctgcgtagtgggtcacctgtggccaaggcctgagctgctgggacacgctcacgtcactgtcttcagagctgatggcagaggatctcggttgagcagggtgtgtctgcgtttgtttttgtccgactgtgggtcatgtgtgtgcttgtggtctttctgtcttcctgggctttgctgggggcccattggagtggccagtggggcctcgttgtcacagctgacacagagcagggcccaggccacccggcttctctctccctgtggttgtgagcgccggggtccttgggccgccatagagacaggccagacaggctctggtcatctcagcggatgcctccgagccgcctttcccttttgaagtccccagcactgctctgaaatttcatttaccgattaaaaagcaattcccaggccatactgacgacgtgcacggtgtgagtgactgcgtcctctaggcctgagtggcagccacacagcctggccctggcagtggtgtcctccgcctggctccctgaatgttcaccagctcctgcgggttttcctctcctcatgctcctgggggtggggcacccatcctgcccgtgttgcctcctgctctatgttcttgacgtgggatggcggccagggactctgccctcgctcagtgcctgccctttaggctctgtgactgtgcacttgggagttctgggcttcagggtccccttaagtctcctcaggacagccgtgtgcgtgtctctgtgtgcacaggagcgacacatgagaagggagtgtggtctcagggtgggcgtggacccacagtgcccagaccctacttgtcctagaaggagtggcctgggaggccccgcctccgccctcactggccgccgttggctcctcccactcgtgtcttgacagcttattctcgggatatgttttgatttcttcacttcctttgtagcttattttaatatttttgatctgccgaagatgagggcagaacaaagaatgtactggaactctctttgcagggctgctgctcccagcaggccttcgggctctgcggagccggagggggctgaattgccttccgggtgtttgtggccaggccagggtcgggtctcctgcctgagtgggctgggtcagcgccactctcctacccatggtgggaggtgggagagggcggagatgttcccgggtcccaaaccaagtgggaggcagggctgcagctttctccttggaagcctcctgtgacagcggctgtgcctgagcctctggcctgtcggcagtgcagtggcagcatgaggggcagacagtcttcctccagatgccccctcatgtcacggggttacagaggaagcctccgcttctgtccagtggctgtcgggcccggccagcttcctgctgctgtatcttggaagaccatgtgggctgcatgggtgcttggcgagtctcctcttagggaccctggggctgctatccttgacaggggaccttgtctcacctccccactcggtcccacactggctttgtgaccttggacgagttgcttaacctctctgcctcagtgtaaactggggactactgtttattgatcttggactttatgttttgagtggtacaggtggggcacagatgggtcattgtgctgctgggagcacttagccaagactggagcctctgagccttccccactcccacccctctttcttctttccggtcggctcgcctccttcctcgggttctctgatagctgtaggactccattggactacatttttttgtcagtatagacagctgtcagagacggagacaaaatgtggcagttggagctgccgcttggcctgctgcctgggacgcggccccttgtcccgcagaacgtcagccaagcgctttccgtgcaggctgataacagggtggtgccgtgcttcccttgggccgtggcaggatcctgctccaagggggggtcctgctccgagggggccggggtttctgttccaacagggctggtggggggggtcctgttcccagaggtccgggatcctgttctgagggggccagggtcctgttctgggccgggggtcctgctccgagggggccgggcgtcctgttcctaggggcggtgggctgcctgtgtgagagctgttcttcacctgccacgtgcagtctgggcattctggtgactggagaatttgggttgtgttacagtgttgttgctctgtcctgcagatgcctgaattcccaggggtcttgcaggtccccttgcccttgcgctgtgtgggctggcgtgggtctcagtgggctgtgggttgagggtcgcttggttgggaagctctgcgcgcttcccagtggagggtccgcgacgggggttttctgatccctcatgctggcttttgacccgtgtcactgcaaggctgcccctggccccaggcagcgtttcttcaggcaggtgcccagccaggtggtcgggcttgagacctttgagtctcgaggtctgttctggggaatgactgagcttgtggaggccaggaaggggttgctgggcttggagagcctctggggaggagttgtgttttgctctttgctgttttaagctgaaatgatcacaggaagggacagcatcaagagtttctttctgggacacccctcactcagctcagcggccgtgtgtgggtttggggctgtgctctcccagacaccctcaggtccggggagcacttcgggggctatctgtccctttgtccaccagcttcctttggaaaaagtgtttgctgcaagtgtttttctccagcttttcgtggggttccctgtagtcttgggccatgctctggggtcaggctcccggcaggccctggtccccgtgcagaaggccagggtctgcgggtttgggctggtctgccccccaggtgagggttccggaaagacggccggctgctgagtcttctcaagcaggggaaacagcagctcgagagtggttcttgacctctgcccaccccagctggctgtgcacggactggggagggcatgggcagctgcccccaggtggcttctgcagggagcagagcttagtggtcattttcccggcatggtctgtcatccgtctgtctgggacccctctgggagctgggctgggtccctcgccttctggggcagcagggtcacggtgggggggctagtcctctctttcagcatcttgtttctcagccgtccctgcggctatttgtgcaatgtctgtctgtctgagtctccgggtgagggcagacaggatatggtgcgaggaagtctggggtaagtgtgagccgaaccccgccctggagtctctcggggttgtggggccacagccccagcttaggttaggccttcactgctgctggcagggcctccagagagaaggcggtggttccggggcctgggccctgactgtctggcaggaggtgtccacgccggcggcccggctctctgtggcaataatgtgtctctttctaaggattgcgaaagttgagggaggatttctccactggaagaattatgcaagcttcaactgaaatgtttttaaaaagtttctttgttttgagtcaaaatacagaaggtgaattatttccctaatatctgggagagctggaaaagaaggcccctgtccttattcttcagggctcttcccctcctgagcagtggtcaccaggccagggtgtcatggagggggggctgcctggggaccagctctttacacctggcctccagagcgggtggtagggcggctccttcctgccctgccctggctgtcaccctcgtggtctggagcagggtttttttttgttgttatttttttttttttttgagacagggtctgtttctgttgcccaggctggagtgcagtggtgcgatcttggctcactgcagcctccgtctcctgggttcaagcgattctcctgccccagcctcctggtagctgggattacagatgtgtgccaccacacccaagtaatttttttgtatttttagtagagatggggtttcaccatgttggccagcctggtctcgaactcctgacctcaagttatctgcccaccttggcctcccagagtgctgggattacaggcataagccactgtgcctggcccctggagtgggttctgccacggaaggcatccccggggtctgcgggctggaggggtcgcccccactgtgccacctgttctctcgaggcctggttgccctctgcagaccaggtgccatgccaggtgaccctcaggaagctctggctcaccccgggggctggggggcatgataagcgatagctcttaggtgctgctgctttgtgaatatgagagagttccagaagggccccgcttcccagagcctgcatgttggtttcactgtgtggtacttgatatttttccaggctgccttgctggggtggcctcgatggggggcccagggagcctccagctctggggacatgctgccacatgagcctgcttatttacgaaaatgaagaaccaggacttgagtgtgaattttaaatgagattgtggggacaatagtaaaatccagactaggaccagatggactgagcacctgcgttggccatggcccggaggtggcgtggtggtgcctggcgcctgtggccctcagcatgtgtcctgccggccgcctagtaggccttcgcttgaagtgcttattcctttgagtaatgctcctgtcttttgtttggggggaaacagataaagggggctttgagaggcgtctcggcgtgatcctgggaaacggccgagattctgttcggtgcttggtgttcgtgtcttctctgattttacctttttgactcataaagatggaaggagtgctctgcctcggtgcctctgcagctgcagatgctgaatcggggcgtttaggcctgcctcttgggctggcacacctggcggccttggtcaggccttcttgggctgcctctgctggggtgcttgtctcactggccgtgggggttgttgcctgtgtggttgtgttgctggcttcaggggctagggttagggacgcctggtcacgtctgggtccccagtttgggggccagattcaataactcactgaatgactcagtggaactctgcaggcactggcagtcaaggtttattggcaggtccattctttggctagaaggagaatgctgtttcttttctcactgtttcaccatttttttttttgagatggagtcttgctctgttgcccaggctggagtgcagtggcgtgatctcggctcactgcaacctcagcctcccgggttcaagcaattcccctgcctcagcctcctgagcagctgggactacaggtgcgtgccaccacgcctggctaattttttgtattttagtagagacggggttttaccatgttggccaggatggtctccatctcctgacctcttgatctgcccacctcggcctcccaaagtgttgggattacaggcatgagccattgcgcctggccattgttccacctttggaagaaattggttcaccgtcttctgacctggggggcgcttctaccctggttccatattgagggctgggaagttgctggaatattattacccttggctggtgaggctgagtgctgatgctcctcccagctctcagccctgcctggaccaactgcggcttctgctggaacgtcggcggctgacttagaaagaaacagctcctgttctaggcttcctgcaggtcccacggtgctgcttgtttcagagaaacgcagctcaggctggcggcctcaggtgggcatgggtggcaggggatgccatcacccaaatcagggatctttctctgtcctgagggttccaccccaggacccagggcactaactgggttcttgtgtggcccttcccgaccagacctgacccctgagctgcgtgtgtgaggtgatggtgactccacgacagcttgtgtgccgttatgggggcacctgaggactggctgacctcaccgggaagtgcgtcaggagtgggtgaggggtggtgggagggcagggagcgcccagcaggtgtccagcggtgctggcgctgcctctgtctctctgtccacgccctgtgtgtatctggagtggcttaggtgctccctgcggtgctcctggctgctgtggttcctgaaggctgcggctgtgccggtggtttcctttgatgtcagtcttcttctacaggggaaaccatgttgccaggagagccaggtgtccgctaattacgttgtgttgttctgcccaggagtgaacctgtaagtgatgagaataagaagcggctgtcagcctgcagacccgccctcaccctgtcctggttggggtgctgcctgctgggaacccctggtccagctgttgagaggaggctgactgggggcacagttgttgcagagtctgatgcaggctttctctgccgggaaagtaacatggaaacattgttgcttttactatggagcagatgtatctttgcccagaaacagaaatgctcttggtttctttttttggaaataaggcccataggctgggtccttcttgccctgttgagggaacgtgtctgtccttagcgtggaggccagtctggccgggtgctgagctcgtcctgcagaacacgcgtgaacgcctcatccctgagggccccgggaggctggcgccctctgtgggaggtctgaggttggcccatttgaccctatccaggacgggttacttaaggagtccaacgggccttgagaggctgatcaccctcgtgtggcgggcgtctctccccggtgccctcccgcctggtgctgtcaagggcttctctgtgccaggcgctgggctgtggcagccccaggtccccgcctggtgtggctgcccacggtccaggcagctccagggtgggcatccttggctccctccctcaccagctggccctgggaggtctgtctgagaggagttaggcctcattgtccgtgctcagagaacccgagccttccttaggaagcagtttgtccccgtgcctcccttcaggatcctgtggcctgagaagcctctgcgtggcagtggatggcagctccagctgcccgtggccctctttttttatggtttcccagatgactgggccaagctgggcctctgcatcctaggcatgctgttccctgcgcttccctggaaggtcggcggccctgcgtggacctacacggtacccaggacaggcctgccatggcaccggttgggcctctgggcacagggtgctctgcctccatggccctgacaggctctgatgcctgaggatgggggccgggcactcccagccttgagacttccctctgcagaggtggcacaagcccggggccccagagtgaggggactcttgcctgcctggtgagggtgagcgtggggtctggactctgacccctggtccaggcgggagaggagcacactggacagggcagccgagccaccctctgcggagctgtggacactgcgtgtgtggtgctgaaggtgtacacgtccactgaggccacctgcgccgctgcctgtgtcctgtgggctggcactcaccgagtgagagctgtgtgcagaacctccgctgtcagcgggccaggccacactggggagggaggtattccgtgtgcttgcactgaagcctgccccaggctgccttctgggttagggatacccaggacctccatagctggtgtggcgtctgtgagatctcagctgctgcttccctggacgcccgtgtggacctggaggggggtggggacccggcctggcatggtccctggccacctgcctggtgctccgggttgtgccgttggcagtgccttcgctctgcctcacctgctgcctccgcctttcctggctacaaccctgttgcccaaaccattaaaaaaattatactaccaagttgaatgatatgcaaatgtagtcaattaagcgaggggattttaattagcagtttaagttcatgtgtgaagtgccttgccttaattacttgacagttttgttgtaaatttgctaagtttttttttgcagaactatcaaaactgtgatttttgttaacattcttggatgcggtgagtggcgcccagcttgcctgaccctagtgggttttgtcttaatttataaagctctttaaactgtgaaaacaaggtaaaccccctgggttgcctctgtgtggctcttcgagtcaagccgggctcgatgtcttccttgtcactggctggggtggggacctgcctcgtgcgtggtcttgagctcccgttgggggaacgggagaaccttcatcccatgtgggtgtagccgttggcggcacctttgtacggggacacaccctggacctgaatggagtcaggaagggtttcaacctggatggcccgcgtgccggggacccgcaaggtgtgcagtggcaagggccggtcctggtggcgggctccctggtgatgctggtggatggttgtgcgtgggccttggggttcacagttcagtttgggagaggcgagaacccctcactttgaagtctttcctggccaacgggaggcttctcagagcagctttcacggctccggggctgagtgaggcctgtgtctaggctcatcctgccctccggggcgtcccagtgtgcctgggcagtggcgcagctggctccttccactgggtttaggtgtgcttctgctccccactgctgcttcagctgcgtcctttgcgggtccccgtaacttcagtgcccccacccctgttcggttccctgactgagctcggcgcctctagtgtagatgggtttttaattttcccagctgaacgtcgttatttggattgtgatttctttggtgtttcaatggactgtagatgaaggaggacctgttttctctcaggagtgtctgtggggtctcttgtcctggtttgctcagtgaagtgtggccccaagggctgagggaggtggccaggaccccgcagggtggcccccaccacagaggctgctgtcctccgggttcttctccactttctgggaccttggccgaggaggcctctgggagggtgaaatggccacaggcctggagaagcgacaccggtgggaagccaccggcagagaagtcagggaggagggagtcctgggcctggaggaacgtgggaggggcaggcgcctcctagcagcctcaagaaatgtgggccaggcaggtctggctacgggcaggagtgtgtctgggactctgaactgccagaagcacttggcggcaagccacatgctgtcacaatgttgcctggcccccatgaggaggtcccgtgggtggtggcgggtggtggctggttgtggggcaaggctgcgggactgggaccgctggcttcctggggccatcgaggctcccagaagaagaaatcaagaggattttaagaagcagagttctctttagcccgaagtaaccatacagcattaacaagaaaacttggaattcttcgaagtgaagctctctctacttgttcggaggatggaggacagttctagatccaggagagcggtggcgcagacacggacttcacccttggtgggaggggagaagcacagcatcctgttgttcgtgagtcaggtgagaggcgcgagaaaccacagctcttaggaaaatccgtgctgcccagtgtgggggccgtccacagcccttcggcactgctggggaagtggccctgcgtcgaccccaatcctcctcagctgtgttcagcccctgagatgccctgggctccctggttgagctttggtgggtaactgcaggatgcacacaggagctgcaggcgagggctttgtaggagctctgtggccgccccacatccctggcctctgccattttctgcctaaacgttgacacatggaagagggagcccaggatgctgtgggcccagaaggtggggccctgcgggctccatcacttcactccagggcacagagggcccagggtcccctcacacttgcctgtggggaccagtgggaacaattctcattttactgtcattatgaacttgcggcttaaatatgtctgtggacttcaaagtgccatcctgtgtggaaaatttccagctttcactgaagtagagagattagctcaatgcaccccatgtatcccgttcaccagttatccacagctcactcattttgtttcatccaactccctctcctattttgagggggagggattgtaattttttttttctttgagactgagtcctgctctgtcgcccaggctatagtgcagtgctgcgatctccgctcactgcaagctctgtctcccgggttcacgccattctcctgcctcagcctcccgagtagctgggactacaggtgcccgccaccgtgcccggctaatttttttgtgtttttagtagagacggggttttaccgttttagccaggatggtctcgatctcctgacctcgcgatccgcccgcctcggcctcccaaagtgctaggattacaggtgtgagccactgcgcccggccaggactgtaattttttgaagcaaatcccaggcatcatcttatttcatatttaagtgtttcaatatccacatctaaggaatatggaatcataaaaaacgctcaccatgacccattaccttgcctaacaaagctgagggcaatttccggacaccagcccatgttcaggtccttcctgtctcagaagtgttttcctgctgcttttcgggacccagggacagcactgcgtgcgatggatgggtcttccgtgcatgcctgtctgtgtgtgtgtgtgtgtgtgtgcctgtgtgtgcctgtgtgtacgtgtgtggtgctgtgatgggctgtggggacagtcccgcgtgctgacctgagcctggcagagtcaatatcttgttgggaggcagcaggccaggagagagcggagctggttggaggagggccagcctccccacctagagaccgtcggtgaccttcctcatgtgatgcgtcccttggtgtggcccccagccgctagtggtgaacctctgtaaatgtatgtgaacacttcccgtgcatgtctagtcaggagagtaatcagagaagcaattggtatgtgctcatcaaagaaccccagaacagccgagaagagtgcagagggtaaccccttctctgtctttgttcttggtgggttgggggagaagtacagtgtcctgtttgttcacgtcaggggagaggcaggaatgtaccacatctctgtcgctggaaacgtgggaagccgggatgtggcctaccgtggccccttctggccccgcaggggagtgggtgtccctgccctcactgtaatctctaccacattgatggaaagatttttctttttcttatttttggagacaaggtctcgctctgtcatctgtgttggagtgcagtggtgtgatcccagctcactgcagctttgacatcttgggctcaagagattctcccgcctcagcttcctgagtagccgggactgtaggtgggcatcaccacgcctggcggatattttttttaattttagagatgtgatctccgtttgttacccagactggtctgaaactcctgggctcaagtgatcctcctgcctcagcctcccaaagtgctgtgagccaccactcctggcctgaaagtatttttcgtaattggatttttccatatgtgcactaaggtctgcctttttccctgaatgaggcataacaagtatttctgtggctgtgttctctgtgggaatattattgtgacatgcttgtaagaagtaagtgaaaagcacaccagcacggtattcacatagcacagaaggttataaaaggcaaacgcagacatgggtgagggcagagttgttcttggtttgtcacaagggcgtgtgaacgcggttccccacctgccctgctctgctcagcagctttgggatatgagtgccttgggtgcctggtgcctttttgggccagccctgtggtattttggagtatccgttggtattgagagtctggaacttacttagtgtctggggcatgggccgtgttttggtatcgcaagagatgcttcagggcgcgtgtcagcacaaacacatcacacgggcttcgtgaccatgtgctggctgcacgagatgtcagtgtgctccgcgtaccacctgcttcatccccgccctgccctctcgtgctcctcggcagggggccgccatccttatgccccgcctgccctttctgcagctgtgggtgcaggctggccgttgtgctctgttgcaggagctcctgtcaggctgctggtctgcgcgtgtgctctccgagtgcctgtcactctggctgactcactgtgtcagtgtcaccgtgcagctttgctcgtcctgttcttgtgccttgggacgagtgggcagagtgcttgctgttgggtaggctgtggtgcaccatgtgggcctgggagtgaaacagcttggtcagagggcatgtcggtcacgccaggctgtcttccaaagcgtcccaacactccctgtcatcggtcttgttggctgtaaacgagttctctgctgcatgggatgctaggggtgtggtgagtttcttgtagacgtggcaggtcagaggggaggcacactgtctgccaggcaccctgttatttactgatacacgcacacgcaatacacatctctatagattgcttttgtatgttcactcagctgggatgattctgtgtgtgcttagatctttgttcacgtttctgatcatttccttagtggactctgagattcccctaaaaggtgggattgttttacccaaacttttctttctttctttctttctttttttgacacagagtctcgctctgtcacccaggctggagtgcaatggcatgatctcggctcattgcaagctccgcctcccgggttcatcccattctcctgcctcagtctcctgagtagctgggtctacaggtgcccgccaccacacccggataattttttgtatttttagtagagatggggtttcaccgtgttagccaggatggtctcatctcctgacctcgtgatccgcctgcctcggcctcccaaagtgctgggattacaggcgtgagccactgcacctggcccctcctgacaacttttaagattctgtcatttaggctgggcatggtggctcacacctgtaatcccagcactttgggaggccaaggtgggtggatcacttgaggtcaggttttcaagaccagcctggccaacatggtgacaccatgtttctactagaaaaatacaaaaattacctgggcgtggtggtgtgcacctgtagtcccagctacttgggaggctgaggctggagaatagcttgaacctgggaggtgaaggttgcagtgagctgagatggcgccattgtactacagcctgggtgacagagcgagactctgtctcaaaaaacgaaaagcaaaaacaagattctgtcatttagagtgtctttgttaatttgaaaggtgaaaaatctcatcatttagtttgtatttctttgctttttggtgggttgattgttttgttatttcagtatttttttctgtaacttgtgcatattacattttcttattgtggcaaaataaacataatgttgaccattacatgtagcattcagcagtgttgaacacataggctgacagtgaaggaatggaaaaagacatcccatgccattggtgaccaaaagaaaacaggagtggctccatttgtatcaaacaaaatatacttttcttcagaaactattactagaaacagaaaagtagttacagaacaataaaagggtcgaatcaactggaagatctaacaataatatatacgcacctaacctcagaacagctaaaactgtaaagcaaattcacgctgctgttcacccaccttcccaggctcagcctttgtccccatgagacactcactccccattctgcctcccccagcccccaacacccacccgccgctttctgtttctgtgactttggtgactctaggggcctcctgtgagtggaatcgcacaggatctgtccttttgtgacagcttatttcactcagcaccatgtcctcaaggcgcagccatgcgtagcctgtgtcacagtctccttccttctcaagactgaaccgcaggctgctgtatggatgtattttgtttacccatttctgtcagtggacacacgggtgacttccacagtttagctgtcgtgaatgatgctgctgtgagcacgggtgcacagtgacctctggagaccctgccttcagttctgggtgtagacccagaagtgggattgctggatcattgatcattctatttttattcatttatttttgagacagcatcttgctctgttgcccaggctggagtgcagtggcacgatctcggctcactgcagcctccacctcctcctgggctcaagcgattctcctgtctcagcctcccaagtagctgggactaaaggcatgtgccaccatgcccagctgatttttgtatttttagtggagatggggtttcaccatgttggccaggctaatcttgaattcttgaccttatgtgacctgcccgccttggcctcctaaagtgctgggattacaagcgtcagccactgcacctggccctatttttccttcttttttttttttttttttttttttttgaggcagggtctcactctgttgcccaggccagagtgcggtggcacagtctcggctcactgcaacctccgcctcccaggttcaagtgattctcctgcctcagcctcctgagtagctggggctataggtgtgtgccaccacacctggctaatttttgtttttttagtagagacgggtttcgccacgttggccaggctggtctctgactcctggcctcaagccgtcatcccgcctcggcctcccaaagtgctgggattacaggcgtgagccaccgcattcagcccgtttttctttttaaagaaccgactgtttttcatagtggctgcagcattttccactcccagcaacagcgttcgagcagcactgtctttgcatcctctccagcacttgttctgttttttgacagcggccatcctaatgggtgtgaggtggcatctcattgtggttttggttctcatttccctgatgattagtatgttgggcattttttcgtgtgcttattggccactcctatatcctctttgaggaatgtctgagtccctctttgagtcgagttgtgtgtgggggcctttgctcagttgtacgtctttatctactctggttagtgatcctgttctacttgtaaatttctgtctcctgtttgtctactgcgtgcaccgtggtcggatcctgcctctgttgctggaggctgcctctgtcctctgctgtggtggtcaggaagctggagcgtctcggcgccagattcatgtttgtaagaggagacgctctgtgagcctcggtgtgcagcgctgtctgcaagtcagactccccacccctcctttgtgcgagctgggcgggggctctgccgggactggtggtgttcatggagagggcttctgtgtgatgaagagatgacagtgacctgctggggccgaaggctgtgagtgccattgggggagggagtctcagagagtgcggcagtcgggcctgatggggctgctcttctgtgaaggggcacctaccgtgtgcctggcctgtagcagcagcaaagaggaacctgatggggggggcctcaggaacctccacctcgcccactgtggccaggctgcttctgctttctgggaggcctgtgcaagagccatgggcacaggccgggcacggtggctcacgcctgtaatcccagcactttgggaggctgaggccagcggatcacaaggtcaggagttcaagaccagcctggccaatatggtgaaatctcgtctctactaaaaatacaaaagttagccaggtgtggtggcatgcacctggtcccagctacttgggaggctgaggcaggagaatcacttgaacctgggagtcggagtttgcagtgagccgagattgtgccactgcacttcagcctgggcaacagagcaagactccatcttaaaaaaacaaaaaacaaaaaagggagccgtgggcatgtgtgtgcacaggtgtgcatgggtgtgtgcagctggagagggaagggcctgggtcaggggcgccctcagcctggagccagggaagggcagcgagaggaccccagactcccaaatgaccaagggcctgtttgcagcgtgcttctccctcctttcttctggctctgaagttatatcctgccagatcctggagaaagttcttttagcaaaatgatggcttcgctgaagatgatacttgccacctcacagaagcctgtcacgttcctccctttggaacccattgccaaatgtgggtggtgtggtggacccggggcaaggggccattctctggcagcccctagaaatgcctccctggggttggggtgcagccaccaggcaagaagtatgtacccccttgccctggccacttggggtttctgggacaatctgctggcttggccttgactttttcctgaacctaggagcccagggcctgctcctggcatcaggacttgctcttcctctttcctgggccccacaggtgcccttggggagcacacagctgccccagcccgagtccagtctggctctcgggaaggggccttactgctggctgcacaccttggcctccttcccctggatgcgccattgccaacgcagctgggacagcccttggacgcagcgtgcccgccccttttaccagggcatgtgggctgggaccagtttcagccccatgttgacttgtttggctctgctggtggtgacgggggggcgcggtggcggggggccttggtcgcgtcgtgtctgctcttgtgcaccggtgcctcacggagaggctgtggtgagtgcgcggaaggaccctggtgcttttggggactttctggagcagcccacattccttccccagagccctaggggcctggccagctgcctttccaggccctgaggccaccaggttcttggggggagctcctaggttctgctttggcctggctgggtggtgcccacactgccgcgtcccctctccggggctgcccggactcagcctggctggcagccatttccgttacttggtttccaaaggccccatcttggaatcaggagcaggctgtgggactcagggtgggttctgagcttggtgacccgctctgctcttttgtccggctttgtcctaactgttgaatattaatgaggggcgccgcagggtggctctccagtggagggtcctcactttttgttttgcaaataacgctggggcccctgcgccactggggcaatgcaactgtgacggtgctggttggattcaaaaggaagcctggcagtggcggggcctggacaggcagcctttgacctgaggcggggcggcgctctgcgctggttcagaaaagccgtggggcagcctctctggcaggcactggctgtacctgttggttttcctttgcccacagtgaagtgaaagtcactgcagctgggtttgctgtttaactcactgtctttccttctcacgtcttctctgtgcaaatagtggtcagtgtactttttgattatttcagtcaagtggaagtttctaggagcgtagagaggcagcgtggcttagggtttaggagcatggctgggctaccttcctactctgagtgtgggccacgttacttttctaggcctcagtttcccattggcccctctcctgtttggaagaggcagctgggtcccacaagccatctcaggagccgcgtctgggcgctggcacggggactgtgcccacagccagccagcctggtggtcagctgatggattcccgtaggtacttagcaaaatgcctggagtgtgcgaggctgtcaggccagtggcagatgcggtcgagtgctgttgtttcttggtgctgcctggcactgccaccctgatggtcggctctgagttggaggccagctttcatggcagcgttgttggtgggcgtgcagggtgtgtctgacctgggcctgggcatcaggtcccattgtggttgggtccacagggccccttgcctcattcgtggaggtgctgggggaattctacaggctgaggacgtgtgaggctccagggtccagcgtgcaggccggatgttcctagcgttgccggccacgcagacagccgtgccaccaggaggttccctggcaatgggagacaattgtctgctcagttcagccttcagtgccccagggctgttttgagatcaaggctgagggggaccctttcaagtgtctctgcctttggtggtcccgggtggccggctcctcacccatggtgtggtctgagtgggctgaaaccgaccccaggtgattcttattcggaagagatgtttctggaaatgagagcaaggcagtgagtggagagccagctgagagatgcttgactccccacctgctgctgttggggccaaaagcgtggaggagggaagagccagcacagagggctcacggtgtcccctgctccaaccgactcactggccgcggcctcatggggcctccctgtcctgcctcctgctcaacaggccacaggttttgttggattcgtcaattatgacccaggttgttgaactggaattggagatgtttttacagttggagagtttgttacagtcagaacatttcgggttgttggagttcggtgtcttgctgctgttgcagcttgcatcttttggccacagtttttttttttgatacagtgtcactctgtctcccaggctggagtgcagtggtgtgatcttggctcacagcaacctccgcctcctggattcaagtgattctcctgcctcagcctcccgaatagctgggattacaggcgcccgcccaccacgcccggctaatatttgtatttttagtagagacggggtttcaccatgttggccaagctagtctcgaactcctgacctcaagtgatgcagccgccttggcctcccaaagtgctgggattacaggcatgagccatcgcacctggccatggccacctgttttaaggaaaccactcagtgtcttaaaagttaagggtgctcattgccctgctcaacagagagtcccgtgtggtgctgggtagccctcgtgccgctctctggccgtcccagaacccgctgtccgttcccagcgtgtcctcgagtgtggggtggccactgctgcccaggtatgccactgtccatggctgatggaggagcaggaagtggcccatttgcaagcctgctgcctgtccttggtttgggtctttttattttgagaaatctccaaacctacatacagcgaagttgcaggaagaacgtggtgagtccccattccctgagctcagctgctgctggcactggcctcctctcgccacgactgtttttgcaactttttgccggtcatttgagagaatgtttcagtcagtggggtcctccctgctaagcccttcattctgaatttctaaaagtaaggggatgtggtgtgtgaccgtgacacggtgaccaagtctgggaagctggctcccctggccacgctctgccgtgtctgccacgccctcttcagtagtttacttctgcctgggacctgcctggcggctcagctgactcttctcttgggcctgcctcgttgccctaggcagctggctgcgcgttggcagggcccggacgggcaggtgggtagcggcagccccggggggccggtgccctatcagaggcgtgggaggcatcaggagcaagcggcccccatgcttttctcaggggagcctctcccttggtaattaatgagtaatccgccgaggggaactttggaccccaaaagtcccctgtccccatggactttatccgggtgggccaggatccctggtgagtctgcttgtcttagggatggggacgtggggcactgaccgcactcttggccactgctgctgctggagtctcgcctttctcctcccgcctgccttcttgccgtgtagtagcgctgcggaccgtgttcggaaagagtcacttactgtccgttctagtcacagttttgatgcccaagttgaccttctgttggctgcccacaggtctgggtatctgctgatgttcttttatttatttattttttgtagagatggggtctcactctgtggcccaggctggtcgtgaattcctgggcttgagccatcctcccgcctggtgtcccacagtactgggattacaggtgtgaacccccgctccctccccctgccccagcccctgctgaggtcttatttcagagccggcagggttttcccagctctcaagcgccctcacgtcccaccacagtgacgtatggtgtgttcactcctgtcctggtccccaggtcgtgtggggccatcgaggctcatccccagctgcagccgccctcctttccctgtagagccctcgcctgtgtaacggttactgcctctgtgtgggcagcatctgggggggctggcgccgggcagtgggagacctgctccatgtcactggtggaacccaatgtatgtgataggttcacaggtctcagctgtgaaattgtgtttgtacacggtggctttttctagaaaaatgaaccgcaaagtatttctttcctcgtgaatgtcgaccattttctcgagtctggttgttgttggccagtgacacaaacctgcagcttctccccttcttgcttccctccccgccccttggctccgggcacagcgtggctgaaccggcttatctggcctcgtctctggaggcctccccagctgtcatgtccgttgacatttcactgttcctggcagtggctgtgcccagacgcgccgtggcacgtgggagtgatgctggtctttgccagtgctctgcacacctgtggggaggcctctcggggtttcctgccaggtctctgtgcaccccccggtgagagatctgaggaggaggaggaggaaccgagggcaggtagggcgctcttcagatgtggagggttggaatctccagtttaataacaaactttatcctaccttaagttttcaaaagtcttgtaaagaacgggtccattcatttttagctgctccgtgaaaggtgagaaagctgagtagggggctgtgtcccaagaccagggtttgctgtggcctggctcgattgagaatcccctgggccccaggagggtgctgtggctgctgaggaggctgccccacgttctgatcctggtgcagggctgcactcagcctccccagaagcagcttggtcccgggtcccacctggcactaacctctgcagggcccctttatgtcatggtgttttggcctgtggaaggctttcgtccgtctgagctgctgactgagggtctttatttccacactcgagagaaacctggcggcccagcagtcagtgcccgcggagcaggtacagctcagggaagggagcagccccttgctcacggtcctttctggcacagtctgtggccctctggagtacccggccagcgtcctcacagctgtccccaaacgcgtggtatgggttcctccctcagggccagcaccaggctggtgctcagctcttctggaagagccgtcccatggtcccagcgcatccgtggaagagtgaaatattgaacgttacaagaaggaagtgaggccaggcgcggtatctcgtgcctgtaatcccagcacttttggagttggcgatgggcagatcacttgaggtcaggagtttgagaccagcctggatcaaaatggcaaaactccatctctactgaaaatacaaaaattagccgggcgtggttgcaggtgcctgtaatcccagctacttgggaggctgaggcatgagaagagcttgaatccgggaggcagaggttgcagtgagcccaggtcatgccactgtactgcagcctgggtgatggagtgagaccctgtctgaaaaaaaaaaaaaaaatagagttgctaaattggagtaaatatttcataacgcgattcagttcagttgctttagctgctctgtgagtccagcacccgcctgcagcgcagcctcccctgtggagtctggagcacccaggcctacatcacaggctccagagcacccgggccggtatcacgggctccagagcacccaggttggtatcatgggctccagagcacccaggccggtatcacgggctccagcacagcgggcaaaaggtgggaggctccccagactttaggtgtctggagttatccataaagggggcttcctgagttttggtgtatcccttggtttacaacccagggagaagcctggccacttgtgagtgcaggtcgtccttggacacacacttggaggaatcggaaggaacaggacacgcagccttatgttcctgtcagcccttcctgcacatatgccctgtctcagggggctgctggcctctgccagggcctcctcacttttgttcctgaggacatcttcccagcgcgtgtgcacttactaaatgagccacatgcccccagttctgacagctaggaacggtgcgagcagatggaggatggagctggtgctgctgcccacaggggccctgggagtgaggctgcgggtccctcgtgccctggtgcggccctggcttgaggccttggtttgggggtgttgtgccccccctaccagggctgagagcccacagtgacagcagaggggaggtgtgtgcgggggccgggcatcgatgctggacttgctgagggttgctttctggtggtgtgcacacatcttgggccagagtggtgtccccagagtgcctgctgctggaagagaaggctctgggtccttctggatgcccatcctggctgtgtggaccacggcggcaagggccacgtgcctggtcgtcaggccacggatgcttgtccggagctgcctcatgtggctcttgcacagaaggcaccattctagacattccaggtgggctccagtgaccatgaggggctggggttggcactggcgctgctcctctgaggtgttggacccacgtgggagctgcttgttcccctccagacactgattgtgaagaatctggaaggtccacgctagaggaggccacgacctgctggtgcgcctgcaagagtgctggcccaactggtctccatgcgtggtgcccgttggagggggtgggagggctcggctctgctctccccccgtgggtcttcgtgtcacagggtgcttgggggactctgctgcactgagatctccagcgtgacatgtccccgtcccaaacagccctgaaatggcaatgcctcatcctaggattaccgtcccttcccgaaggcttgaggtcctacttagatgtctactggactgctttttattttaatttacttgatactcagtctgggtgcgttgaagacgcggcctctggctgtcagcctgtccttgtgtgcagtgaccggtctacctgtctggccttgtgcctagacttgtggccgtcaccactatctctggggaggggtgaagtggactgggaggtaggagccgaattggagtcttctctttgttcctgaagttatcacagtcttggccagactgtggtcactgcgtgcgtgtgtgtgtgtgtgtgatgcgcagggcatttgctggtggaatagcacgggccattggcatttgcacctgaggcgtgcagcccccctgctgcacacctatggggtccctgcggtcaggtgagctctggggggtttctgagggtggagacagccacaacaacacttctttcctccaaatgcctgtgctgtgcacttgggtgcaggtggcttttaggggacatggctgggcactgccccacagtgtcacctctgtgtcctgtggtgcgtgctgtggactggcaccacaccccacgtgcttgttaggccagtttctctcaggtgtcggtcaccctaccatgcggcctttcttttgtcttttatctttagctaaggagtccatggcataccaaaagctgaatgatgacagccagtgtccccatcctgtcctccccaactttccacaggcagggacgctccccattcttgctgcatagtcttctgttgaccccatgtacctgagtgacccccacgtacctgagtgtgacaagcactatggtgcttgacctcagtccagctgcttagacctgtacctgccacagccccacgtgctgacaccttgcgtcttgagttttgataaatctatcctttggctgattaatatgactgagtggtgtcttctgaccccatttcttatctggaacactgtgtcctgacttcatttcctgtctggagcacactgtcctgacctcatttcctgtctggaacacactgtgtcctgacctcatttcctgcctggagctctctgtgtcctgacctcatttcctgtctgtgccgctctgtcctgacctcattttctgtctgtgccaccctttgtcctgacctcatttcctgtctggaacatgctgtgtcctaactgcatttcctgtctggagctctctctgtcctgacctcatttcctgtctggatctctctatgtcctgacctcatttcctgtctggaacatgctgtatcctgatatcatttcctgtctgtgccactttgtccggacctcattttctgtctggagcactctgtatcctgacctcatttcctgtttgtgccaccctttgtcctgacctcatttcctgtctggaacatgctgtgtccggattgcatttcctctctggagctctctctgtcctgacctcatttcctgtctggagccagtgacctcatttcctgtctgtgtcactctgtcctgacctcatttcctgtctgtgccactctttgtcctgacctcatttcctgtatgcaacacactgtgcccggactgcatttcctgtctggagctctctctgtcctgatctcatttcctgtcaggagcactctgtgtactgacctcatttcctgtctgtgccactcttgtgtcctgacctcttttccagtctgtgccactctgtgtcctgacctcatttcttatctgtgccactctgtgtcctgacctcatttcctgtctggagcactctgtcctgacctcatttcctgtcttgtgtcctgacctcatttcctgtctggagctctctgtgtccttacctcatttcctgtctgtgctgctttctgtcttggagttgcgtgcctgacctcatttcctctccactgtgtgttcctggagttaggcatcatcttggtttttactcccttgcttggttttctcaggatctctggctgctccgtccttgctccagcgttcttctctgccccctccctctgtggtccagaggccgatggccagctggccctcacctgcccgccctgggtatttctgtgctcttcctggtgagggattctaggggttcccctcctgggttcatccttacctgagtagccacagcacactgtgcagttgggtgcctgggaggcacgtgctttgggtgttgcatggctgacctggtaactgggcacccgtgtatggagggctggaacagaacacttgtcggcgctcctcagcgtcttgcctctggtgtccccatggcgaagtcccctgccatctgctttgggctctgacatgtgacctgactgtgcccttcaggagctttcagaacctcctcttagatctggcattcaaaatgtcttgtcagacacctcgaggcggcttgtgtttggccctgtgttgggcgcctattgggcccttgtcaggtttttgttgccaggaggctcgcgccccgatcttcgggatggtgcccgtggcatcttctgctcggtgctccctagggctggacgttggtcctcctggcactggtgctccggttgctgtggtctccctgctgttcccttgtggctcaggattactctctggaggtctccgccttatcatgagcactttctttgttggctacttttagtttcatgatttcattttcgtttctaagatatctatctctttgtaaaagctcccaccttttgtgacttgtggatgctgtatctttctcctgttgctgcagacattaatgatgtttttcttgacagtttgtcctgctggtttcctctgcattcctttggttggtttcagacctcggctttaaaggggcatttccccacattgccaattcttgaccatctggtcacgtcaaggctgacgtgccaatggctgcaagggggagggcacctgggagcccgcggatggctcttatgcagacgtgcgggccagccccgatcctgcttctgcaaggcctcccctcccatggtggcgctttggtgccagagcgcgtcggcgtggctccctagcgtctgcctctgcagctgcttggcccccagccgcctcctcccagctgcctcctgccctatgtgtgcttgagctcgagacaatgcttccttcatccaagagccgggctctcggcgatttttgagaggagaatggggttgaagcgatgttgctcttccgtcttaaaactggatttctttcctcatgcttttgaattattatatcttcttgacatgtttctctggatttgcaaaagatttttatattttatatatttatttatttacttatttatttatttttgaggtggaactttgctcttgttgcccaggctggagtgcaatggtgtgatctgggctcactgcagcctccgcctcctgagttcaagcaattctcctaccttagcctgctgagtagctgggattacaggcatgtgccaccatgcctggctaattttgtagttttagtagagatggggtttctccatgttggttaggttggtctcgaactcccgacctcaggtgatctgcccgcctcagcctcccaaagtgctgggattacaggcttgatccactgtgcccagcctgcacaacattttaagtaaatgttgacattttaagcattgagcaaggaagagtgtgaagaggtactttataaagggaaatatggcaatactgattatttgcgactttaaccagaagtaatctttggacagccagatgttattgtcttggaatgtggtgttttatctagtgacaatgtgtgtgcatgcacacgtggacacacaggattcctggtccttaaacccgtatgttcggtgtctgcagcatagaatggtctcggctggtatgtgtgggaccagctcagatgcccctattctagatgccgaggccgaatcgccccctagggaggatgggacagtggctgtgctgagcgtgctacggcgtcatggaagaacagcagaggcgtttgagaattgtgttttttaaaaagagttgaaacttgtcagtcaggaaatggagtaacaggtttatcaggagtgtcattttccttttttttttttttttctcccatgagtggcttggtcggggaactcatgtttttttttgtttttgtttttgagtcagagtctaggtctgtcacccaggctggagtgctgtgatgtggtcttggctcactgcaacctctgcctcccaggttcaagggattctcctgcctcagcctcctgagtagctgggattataggcgcctgccaccatgcccggctaattttttaatttttagtagagacggggtttgttggtcaggctgatcttgaactcctgaccttgtgagctacccaccttggcctcccaaagtgctgggattacaggcgtgagccaccgtgcctggcgggagctcatgttttatctgaggtggcccagggccccacctgggagcagggtcagcagtgcctggcccttgagtgtttgcctcggggtgtgttccttttaaatcagatcagctcatcacttggccggttttctagaccagcatattcaaacccaaggtttggaatcttgggctggcttctgaaatgacatgctgtgggctccatccccagaattctgggttcccaggtccgaggtagggactgagaatgtgcatctctagcaagttcccagatgacatggtggctcctccggaacccctgcctccttttgtgggtaaagttttacaggtgcatggccacgccccaccgccctcgccggtgctgtctgtggctgttttgtgccacagcagaaaggctgagtaggtgcgagagagaccatgtggcctacaaacccaaaatatgtgtgatttggtcccttacggaaaacacttgcaggttcctgatctagagaaagaataattgtaacgcagggctacattgtttttgtgaaactctttaggatggaaaagggcatctctgaggtcagcgacagaagccgtggtggtttcatgccaccagtttacctttgtcctgagctgtggaggttgtttaaagctatagatcaaatgaagcctggaatataagggtgcagttaggatgattgctgtgtagttattttttaaaacggctttttgaggcataattaacataagctgcgtatatttaaagatacagttagataacttttgatgtatgcaaacacatataaaacatgtataaaaccctcgctgccgtccagatgatgaacctgtccgtcacccagaagctctctcctacccacacccctttctccccaggctgcagcagtctgcttttgggcctgtagattcgttgccttccttagagctttgtctaaatgaaatcctacaatatgttcttcttttggtctggcttccttccctcagcgtcattattttgggctccttggatgcgtggcgtgtgctgggcagtgttcccctgcgtggatgtcgcgtttgttcctccatttgcccgttggagcgtgtggagtgtttccagttcttgactgtcacaaagaaagcggctgtgaacattcgggtacaagttgttgtcgggatacacggttttatttccctggatagatacctaggtgtggaatggctggatcatatatttgtgcttatgtttaacttttagaaactgccagactatcttccaaggtggctgcaccattcctcgtcctaccagcagtgagtgagagttcctgctgctccacgtcctggccagcgtgtgtggtgggcgggcttaggcgttcagccgtcctgatgggtgtgcggcggcatctccttgaggtttaagttgcgcttccccaatcgttgagaacgtagagtggcttctcttgtgcgtatttgccaccatatgtcttctttggtgaaatgtcccttctgatttttgccagttattttagactgggtttgttgttttactgttgactcgtgagatctttacgtattctggatgcaagtcccttttcacatttgcgccttacgtagactttgtccctgtccatggctttccttttctgaacggtgttttttgaagagtagaactgcaaaatttttatgggatccaatttttcagtttgttctttttctttttttttttttttttttttttgagacagggtgtggttctgttgcccaggctagagcacaatcttgtgatctgggctcactgcagcctttacctcccaggctgaggtgatcctcctgcctcagcctcctggctagctgagactacaggcacatgccaccacacctggctaatttttgtattttttgtagagacggggtttcgctatgttgcccaggctggttgcgaactctagctcaaatgatccgcctgccttggcctcccaaagtgctgagattacaggtgtgagccactacgtccggcctcagtttgttcttttggtttggacttcggtttcctagctgggaactttgtccctaactcaaggtcacagagattatctcctgtattctagaaattttgtagctttaagttgtatatttaggtctgtgatccattttgagttaatttttgtgtgcaatgcaaggtgtggacctgagttcatttctttgcctaaggtgttcagatgtttcagtggagtttgttgtaaagattagttctctactggattgtctttgtgcctttgtcagaaatcagctgtgcagatgtgtattcagttgatccacttgtttatctttttacatcaacgccatgctgttttggattattgtagctttgaaataattgttgaggtcaggtgatattcgcgctctaaccctgcactttttcagagctgttacagctattcgggatcttccacttttccatatgaattttagaatcagtttgtcaatttctgtgaacatttctgggaaattttgattgggattgtattgagtccatagataaattgggaatatcttaacaatcgggagttttccgaccaacggaaagctctctgtttatgggttgttattaatttagtattttgtaatttttagtgcacaggtttttaccatcttttgtcagatttattgatttatctattgaggttttttcttggtcttgtaaataatatattttaaaaattcgattactggatataaacggccactacagttcttatatgttgatcctgcagcctgtaaccttcctaacttgctcatgagtcctagtggcttttattgtagttgccattgggttttctgtgtagatgatcatgtcgtctgcagtaaaagcagtttcacttcttcctttccagtctggatgcttttttatttgtcctgcttaatggcaccggctagggcctccagggcagtttgaataggagtggtgggagtggacgccctcgctcctgatctcctgatctggaaggcgtggaatcagagtttggatgggagtggtgggagtggacgccctcactcctgatctcctggtctggaaggcgtggaatcagagtttgggtgggagtggtgggagtggacgccctcgctcctgatctcctgatctcctggtctggaaggcgtggaatcagagtttgggtgggagtggtgggagtggacgccctcgctcctgatctcctgatctcctgatctggaaggcgtggaatcagagtttgggtgggagtggtgggagtggacaccctcgctcctgatctcctggtctggaaggcgtggaatcagagtttgggtgggagtggtgggagtggacacccttgctcctgatctcttgatctcctagtctggaaggcgtggaatcagagtttggatgggagtggtgggagtggacgccctcgctcctgatctcctggtctggaaggcgtggaatcagagtttggatgggagtggtcggagtggacaccctcgctcctgatctcctgatctggaaggcgtggaatcagagtttgggtgggagtggtgggagtggacaccctcgctcctgatctcctgatctggaaggcgtggagtcagagtttgggtgggagtggtgggagtggacgtcctcgctcctgatctcctgatctggaaggcgtggagtcagagtttgggtgggagtggacgccctcgctcctgatctcctggtctggaaggcgtggaatcagagtttgggtgggagtggtgggcgtggacgcccttgctcctgatctggatttggcaccgtcgagtgtgatggtgcatgttgggttttcgccagtgccctttatgagtccgaggaagtccccagaatacggttcctagtttgatcaggaaggatattgggttttgtcaggtgtttttttttcttaatttattgagattattaatatggtgagtgtctttctatttcaggttactaatgtgatgaattatattgactgattcttgaatgctaaaccaattgttcattcctgggatagccccccttcagtcgtgatgtattattattttagaatattgttgaatttgtttttttttgtttttgtttttgagaccgagtcttgctctgcacccaggctggagtgcaatggcgctatctcggctcactgtaacccccgccttccaggttcaaatgattctcctgcctcagcctcctaagttgctgggataacaggtgtccaccgccacacccagctaattttttgtattttcagtagagacagggtttcaccatgttggtcaggctggtcccgaactcctgacctcaagtgatctgtctgcctcggcctcccaaagtgctgggattacaggcatgtgccactgtgtttggcctcttgagttttatttgctaaaattttgcttagaattttttttttttttttttttggagacggagtcttgctctgtcgcccaggctggagtgcagtgacacgatcttggcttgctggaacctccgcctcctgggttcaagcgattctcctgtctcagccttccaagtagtagggattacaggcgcatgccactgtgcctggctaatttttgtatttttaatagagacggggtttcagcatgttggccaggcagtcttgaacttctgatattaggtgatcctcctgcctcagcctcccaaagtgctgggattacaggcgtgagccactgcgcctgccaagaatttttgcatttatattcatgagggatgttggtgtgtgtttttttttcttcttcttcccgtgtatctttgtctggttttggtgttaacagagtaatgttcttgtagaatgatttgagaggtatttcctcctaagttttctgaagaattttttcttttaaaaatgtttggtggggggactgggcgcggtggctcatgcctgtaatcccagcactttgggaggccaagtcaggagttcgagaccagattggccaatatggtggtgagatggttcacccatctctgtgccactgcacttcagcctgggcgacaaagcaagactccatctcaaaaaaaaaaaaaaaaaagtttcgtggggctaggcatggtggctcacgcctataatcctagcactttgggaggccaaggcaggaggatcccttaagcccaggagttcgagaacagcctgggcaacatagggagacactgtttctattaaaaaaaaaaaagtttcgtggaacttaccattaaaacctactcggacccagagtgttttttgtgggaagatttttagctatatagactattcagtttatctgttcttggttgagagttactggtttgtgttacacaagtaattttctcaattcaactaaaaatgccatttctccctttgtttctgaaaggtatttgcgtaggtatagaattataggttgacttcaaaaagtttcaattttttttgtggtttaatttaatttaatttatttatttgagatggagtcttgctctgtcacccaggctgaagtgcagtggcacgatctcggctcactgcaacctctgcctctgggttcaagtgattctcatgcctcagcctcccgagtagttgggattacaggcacccgccaccacacctggctaattttttgtatttttagtagagacagggtttctccatgttggacaggatggtcttgatctcctgacctcatggatccgcctgcttcaggtttccaaagtgctgggattacaggggtgagccactgcgtccggcctgttttatttttttgtagagatgggatttcaccatgttggtcagcctggtcttgaacttggactcaagcagtctgccctccccagcttcccatagtgctgagattacacaggcatgagccaccgtgcctggccccaattttcagtactttaaagatgttgctgtactgtgttcctgcatgcgtgcttccagagagagatctgctcatcctcttcttgacggacatgcctcttctttttttctttctttcctttgtttttttgagacagaatctcactctgtcacccaggctgaagtgcagtgggacgatctcagctcactgcaacctctgcctccgggttcaagtgattctcatgcctcagcctcccgcgtacctgggattacaggcacccgccaccacgcctggctaattttttgtatttttagtagagacggggtttctccgtgttggccaggctggtctcgaactcctgatctcaggtgatccacctgccttggcctgccaaagtgctgggattacaggagtgagccacggcgcccggctggacatgcctttctttaagattgtctctttgtcactgctttgagccactttgctgtggtttccccgtgccgcatgtgtttggagtacgttgtgtagtttttgtcaggtttggaaggtgtgtctcctgcgtccctcctctgggcacttggtggcccgtgtgtcagtcatgtgaatgttgtcagctcagggtgctcttctcatcttctggattcttttttttcctctatttccctgtgagtagtttctgttactctgtgtccatatcacaaaccttttcttccacaatgtctcctccacggttaatcccatatagcggatgtttcatctctagaagtttgatttgggactatattatatctttcgtgtctttattttactcttttaaatatgtggaatacactgtaataacagttccagtgttctctgtgaatttctatgtctgtgtcaattctggttgtttgcgatggatggatgattttcttcattgtggtccacattttcttgctttctggattctagacgttttgaaatgtgcctgtttgggtgctgaatgtttttgtattcctataaattggctgggcatggtgactcacaccagtaatcctagcactttgggaggctgaggtgggcagattgcttgagtccaggagtttgagaccagcctgggcaacatggagaaaccctgtctctacttaaaaatacaaaaattagccaggcgtggtggtgcacacctgtagtcccagctactcaggaggctgaggtgggaggatcatttgaacccgggaggtggaggttgcagtgagcttcaatcgcgccactgcactccagcctgggtgacagagccagaccctatctcaaggaaaaaaataaaattaaaaaaaaatcttgagctttgtctagactgcgttcagttatttggaggcagcttgatccttttgagtcttgcttttgtgatttttttttaggtgggtctagagctgggctcagggctcattctaggcctgataattcaccactcctgtggcagaatcttctgagagacataggaccccatgaatttgggcaatttcctgtctgtcgggtggagacaggctctctgcctagcctggtgcaagcctcaggcctgttgtctctaaatctttgtgggtgactcttccccagcctcgtggagtttctgcacatacatactgtgatctggggtctgcggaattgccaggggcctctgcagaccccaggccctctgtgtggtgctcccttctctgctgctccgtcctgtgaattccagccgccatgctctccctgaattgtcagctccatctcaacccagtttctgctgggccctgcctgggtcctgcttcctgtaccatggctgggaactctcgggaggcagtgagctggggctgccagagggcttggctccactttgaattttggggaccaccgtcctttgctgcctgacctccagggtccctggggccattgtctcccatctcctgtcttgtctgcgtttttggcctttccagggaggagggtgatgggtctctgtgacttcaccttggctgcaggcgggccctggcatcgcagtccatgagtgacctccagcttctctcatcagccaccccgttcatccactccatttgtaaaatgagatagaaaatgaagatggtgctgtcgtcacagcggccggatatctgtagctcgtgggctcccctctaggctgaggctcttgttgtgggagaaagttgctcagggccaagtttcagatagaaagagcgaaagtaactggaaatgttgagatggccctggaggccctcagggtggcctctgcttcagggaggaaggtgggcaaatcacgctccgtggcagcaggtttaaaaacatcgctgaattgtgctgactggcacatccattgtgagcggatgtgttttccttctgcaataattttggctacattaaattcgttttgttaacatcttcatcaccgccttttcagtttcagcgggaattgattatgaacaaagtgccatgattttgactattcaggcgagcaactgcatcgagccagcactgaactggttttgtaacaagcttggtgtccatatcgctcttaataacatctgcaggcacaggcgacgatagcagttgtgggccagccgtcaggaaaggggggactagcacgtaccactcagaattcagcttgcgcgggctgcggtggagttctggggtttgtttgtgggcatttccaggtagtctgatcctgtgaggagcaaggaaggggtgtgttgacagggccgttcgggccggagcaggtgcgacaggaatgtcccacgtcctctcgtgtgctgtcgggagacaaacctcttcctgcttcaatatcccattcgttccagagcctcctttcagggtggaaggggtggtggatggctttgggattgggccaggcctgagggcactgagggagtggggcattaggggccacgtggtcagcactgcactctgctctcatcggaagctgggcagtggccagaggcctgggaaaggcttgttgtgggggcggggggcgcaccacacttcagggatgcagccggcctttgggcttcaggaaacgcagctgggacatcctgaggtgtgtgaggctgatgcatgggcctttctacttccagactgtcccaggacacgggtccacggtcacacggtctccaaatgagcaggaacaccttgcatgccctgcgagatgtgtttgaaagtcacactttggttccaggtcacagcttgaacctcaggccacctccagtgggaggctggaggtcctgtgtgccacccggggcctgtgtgctgtggtggtcgtggctctgtgggtgccgggcagaggcctcccaggctgggcagccgccacccctctgtggacgctactcacccttagaagcaggttcccacaggccagggcactcccaacagcactgcgtggagctggtgcccacccctgtggtcagatgcatggcgcccgcagccctggcccaggtgccccctgggttgtgcggcggggccctggctctgtgggtgggtggctgtgctgccgctgctgtcgcccatccttgggggccggcgtcgcctccctgctgctcctactgtgtgctttcttgcccctccagtgcctcccagggggctgtgtagccaggtgtctcagagggctcagggctcctggtagggtttgggtgggctgaaccctgcaccctggcccgggtgtggggtcctggtgctctgtggcctgggacacccgtgcttcctgcaggctctgcgtggcgctgatggagggcctcttgttaagggggcacggtagtgagtcaggtgcccgggggctcataagccaccttggggtatgtctgggtgcatggggactcctctggcctccccagcggtgctgagccgtcactgcagggcagccatggcccatttggctggtgctgagacaaggtgaattttcttggctggcttgacaggtccccctttccctcaccatggagtttcacccaattttcagctttgacggagaaatgaggcttggagtctttttctggcctgtgagggctgcagagcagcgtgcccaggggctgtaggtgcagtccagggagaggccatgacaggagtgggtgtggggactggtggggacagcgactgtgccttctggccccacccagagagccccagctgctgtgctgccgtattctgattccttcttccctccctccctcccttctgcctttcccctttatcctttccccccttccatgtccatttcccttttccctccctccctctctttccttctctccttctctccctcttcttttttcgacagggtctggctctggctctgtcacccaggctggagtgcagcagcacagtcttgcggcctcaaccttgttggttcaagtgatcctcccacctcagcctcatgagtagccgagactacaggcacacaccactacatctggctaacgttttatattttttgggtagagatggggtctcgccatgttgtccaggctggtctagaactcctgggctcaagcgatcctcctgcttcagcctcccaaagtgttgggatgacaggtgtgagccaccgtgcctggcccatgtttgattctcgatgcagatccagccctgggaagaaagcaccgctggccatgactgggcagagccagagagtgactaaggggctgttaggacagagacagtgggttttgcagtgatgtgagctttgacggaagtggccacactgcaggcccccacagcgtcactagtaggccaagcggacactgcgggacacgttccccaacgtgggatgtccgtcctcagcagtctgtggccttctgtgaagcaaagccgttttgcaggctgggttcatccccgttccaggcccgcactagtggcgcctggttatcaggtgtggtgaggagctttgctgccctggagcgtcgctttgtgggcagaagccaactttggaatcgcctcatggctggccctggacctctcctccttccttccttgttggttgctgttaagccagccttgggcaccagggacagtggggacgtggctgtgcaccgggcccagggctggcaggaggctgcttcagggctctggaccagagcagtgtgtggctggtggtacctgtggctggcgtgggtctggcgggtctggtggtgcctgtggctggcgtgggtctggcgggtctggtggtgcctgtggctggcgtgggtctggcgggtctcgtggtgcctgtggctggcgtgggtctggcgggtctggtggtgcctgtggctggcgtgggtctggcgggtctcgtggtgcctgtggctggcgtgggtctggcgggtctggtggtgcctgtggctggcgtgggtctggcgggtctggcatgtttggtggtgcctgccatcaggctgccgatggatgagcctgcctgtcccccacggattggagttttgcccaggggtgctgtgccctggtcattgtcccctacagccaggcagtaaagtgtggccagcaccttgctgcaagagagggacagaggtcatctgtctacgagctagagcaagggcaggtgggcccactggctggcgctgcgtctgggttcggtcctggacctgctgcgtgttatcctccctgcgggcctggcatgggagtaggggctgagagatgctggtgacaccactctgacgccacggcctgaggcagccgttggacagtgcccatcttgaatgcagccctggtgacctgaagcccctgcgttggtccctcacaggccagggggtgtggccacagggcctgggctttgtcccgtttacgagaggtcaggcggtcacagggtaatgggaggcctgtggttcctgggctgccatctggcgattgtaaaacgggcagtgtgcagtgttgagggggcgctggggaaacaagctgccggctgaggaggccgcactccccgtgcctcccgggcagacacctcacggcctttctctgggtgtctgaacccaaggtgaaaagttcaggctgtccctgctctccagaggggctggaggtggggcgggagcagagactggacctggccagcccctcccgcttcccttcctctgggcccctggactctgggggcgagggcagggctgtttggctgttggacatccttgctgtccctttgctggactctccagaggaccagcatggaggtgcacaagttcacatttgtccctctcctgccccagggcacctggccctgtcccgggccaccccaggctggaccagctgcccatgtcaccaggccaggcgctttccctgtgaatgagccgatggccgcaagtgcctggcctcaggcctgggctgtggggatgactgaggcccagtgaggagtgggctggggcctggtgtgacctgcacggtctgtgggggttggagggatgcgcgacttgggcccaccccagaacttggggtttcctgatgggtgttggggtgcacacaagcctgggctcctttgtgattggcgaccccagggtcccgggacagtccctgagaagcacagaggcctggacactcccacctcccagtcaggccctgccacatcctccctgatggctccaggggcttttgttcactgaagaacacttgctgtcctcccctcagaagagtctgctcggtgggggagccgcagggggctgctccctgtccaggccagagaaaccaggcagcctctcccgccgggagaggtcccccacaggagcctgttatggagccgcgtggcgcctgggctggtgtcacccctgggagcccccttttaaagaagactcattcaatgtccctctctcagacggcctccagcgtggcgattaagcgctcagatgctggcaggttccgcggagtgcccggctgccctcggcaggggctttgtgttggctgccctgccccgggctgaccccagacgctcgccttttgtgctacgctgctctcgcccctcgggaacctttgtcccattgagccccgccattgcctggggccccttgcctgtccctgcgggcccgccccagggcggggattgtggccctggtcccctgggggggggtagggggcttttggtggcctaaggggaccctctgagcactcatgcaggcctccccccaacctcacgtccaggtctgttgccgaggggccaggagattctgacattgtgcgatggccccagaggttgacatcctggggaggattggctggtgatgcttccagaaagtggtttttgaagatgcatctggtcctggcccgtggatggctggcgggactgggagagacactccgggccactggctgctttctcgcagctgttctcctctgggaggacttgcccctgtgggcaggtgcaggggcactgagcggaggggcttgggggcccctgcccgccccaggccaccttgctctctctccaggcctgcgtcctgcaaagaggccgggtcaaaaggtcactgccccgatttttattgctgtctcttacgttctcacgacctcttgccctctgcacagatgggcggggctggagcttccacgagggccggcctttccggggattaaaaacccactgaaaggtctgagcctagctaccaagcttaaatgtcttagtagcttaaaaatggtgttaaaaattaagcaaaacacacatagacttccaggtttagcataaatagaaaccagaggtgttgagaccgtgctgccccctcaaaccagcgcagtggaaagaggggcagagccctccacaggagccctccgctggggggttggggagacggccctggcccagcgtctgcagctcccagcggcactgaatggcagtggccgtccctgtggtctgggggcctccttcccccacaggctacacaagccctggtcctgccaaggctcggggaagccctttgtgactttagaaaaataataatggagggtgaactggttcctatttttgcattgtaattgattgccaagaacccctgaaattaaatacaaccatgtattttaaatggtgtccttaatgtagaatgtttttatcaaaaccaaaactccctgttgaggccttagtgttctgtcaatagcgtgttggagtctggttcccgtctcccctgccccggcctatgtgtgctgaccctgggaccggtgaggcagttctcaccacgccccgagcctccccctcccacgccccgagcctcgccctcccacgcccctcctgcccccgaggctcgctggcgtctgtgcttcttccaggcggagggggaggtggtaggcaccttgggtcttaaatcagagaaactgtcccagcagtagtaaaagtcatcagctggccccaaagagcccctggaaacacaggctgtaccccgcctccatggagacatttggtgccacctgcgttcagtgcagatgccacacggctcttcctgagatggcttccgaggccatttggcccttcatctcgggaacagaccaagggggtgttttcggccgtctgagacccacctgggggtgtctgggccttggccatgctgccttctccaagccccatgcttctcccggcccctcctccttcccactggcgccggagacctttggtagtgggtgtggaaagacagcagctgtggggtccctgtcctggccggccactcctccttcccgccagtgccggagaccctcggaagtgtatgtggaaggacagcagctgtggggtccctatcctggtcagagggtggcattcctcccacagtcctgggagccacagggctgagatgggacttctcagcttggcatggggagggcaggacggggtggctgccatgcctcattctgtctgtgatggaaacgggagggcctggccctgcctctgttactgagcttgagccagggacacccgtgaccctgcctggggcggtcctccccagccttgtgagccagggcagaggtgcaggttgggtggctgacctggtggggggtaagaacatccacggagaagtgtgacgagtgtgcgaccagagtgtggacccagccaggaggcctgaccgtgactgcagcctcccccagcattgcaccaaagtgtgctcgtgcaggacctcgaagatgccccgtgggcagcgttcgggctgaggctgcagggggccttgggagcacggtggccctcctgtctgttctgtggaccgggtgcggatgggccgtgcaggcagacgtgctcttgggtggttgtggtggggatgcctctccgcccaccaccctctcactcactgccctggctggaaggtgacggcatctccctgaccggcagcgccaggatggcagccccacaacagtgtcctggtcgccccagaggcatgctgagcgcccatgcgtgtgcgcaggtcctacgggccgtgtccagacccagccccggggtcaggtgacacctgtagttgggtgagcgctcacacaggcacctccaggtaagggggattgaggaaggtagcgctttgtcaatggcactggttttgctccgaggctggactccttttccctttgaggagctctgctcatgtgctttgcctgctttcccatggcaggctttttattggttaaataaagacacaaacttttcatcagtctttgcaaatacttggttccggcaagttcttggcccttcccaggcttggggctgccggctcacggttcttctctctgcatttcagccaggcccccatatgctgggtttgcaggtcacgaccacccatgacggctgtgctgcgtggggtgcagttccccgtgggcgccgagggtggtgtggggctgcctctcgctcgctccaccagccacccgagggcccgtgtcctggtcgtggccgcgtgtgctctgctgtgtgggtggtcagtcctccccaggggccacctggatggtgtccactcctgccccatggcaggaagtcccagcggcacctggccacgtccctctaacatgtttctggaagtgggattctaggctggagcctcatagcgggcagatactgccccctggccatgagccatgacagttggttgatgggacttgaaggggcctctggacagtgtggctgcagccctggaccctaggagaatagcagccgtgatggggggcagggaccccactttctgggtgggagtgaggagggccggctgctgccccttgctgcagtcatcttcagtcactttcccggccgccacggccccctcctggcttcttgctctcagcagaggggacaagacccttgtgagggtgggcacaggcactccaattgtttggggccttcgctgtcccttgctgtctgtgctggtctttccaggcatccccaggccgtgtgtgtcagcaggtggaggctgggcacctctcacccacccaagctgaagcggcctcacagggggtggcaccaggtgtttctccagctgaacaagctcgccctggaacccccaccctgaaagggctactgcccccatgagaggagcttctagagatggtggccagccttgggggcccggtggagatgtgttcgcggggtcctggtctgattctgtcttggaaggaacatcgggcccctgagaggtcagagcagtggccggcccacggctccgctcaggcgccacggcggctcctttctgtttcttgtagtcactgagttcgaggttcccacagggaggaggcttcctgtggctccgccgtcagggagcagtggggctgccccagcctctgggggctttttaggtgctctgaggcgatctgggtgtggcctggccggtgtgggcagctttgcccttcgtctgagaccccgagccctggggcaggatgaggggtgtggggagagtttgctttttccagagacgtttatctgttttttttttagacggagtctcgctctgtcgcccaggctggagtgcagtggcgcgatctcggctcactgcaagctccgctcccgggttcacgccattctcctgcctcagcctcccaagtagctgggactacaggcgtgtgccatcacactcggctaattttttgtatttttagtagagacggggtttcaccgtgttagccaggatgctctcgatctcctgaccttgtgatccacccacctcggcctcccaaggtgctgggattacaggctgagccaccgcactggccagcgtttatctttaaatgtgccttggacctggcccctggctctttgggagggagagtccttggcaggccccgttgcctccaccccaccagtgcaccttggctcctggtcactgcccaccctccctgcccgggcaggaattcttacaggccctacactcctgaagggaaatcaggctggtcctggggcaggcagcctctcagagctgttgagaattgagcaatctccttgtgctctttcaagctgttcttttctttggttcacactgagcaagggctggttgctccgatagggagaagacgtgaggagtggcatttactgtgattgagcacagggcctgtggactctcccattcacgcagccacatttcccaaaaagaagtggtcctgctccccaccccccgacccccactgcagcgccacctgcctttatctgtacttggagggacagcgcagcaggctgtggctggctaccccaggtggctccacccagctctcagaagttcacctgctgcactcagaggccgtttacttgaggtttgatatttatctccaaaggaagggctgccccgactggcctggaccctccagggagttcagcaagccggaaatgcgtgtctgctgctctcctggcccctgggccacctgcttctgtggccctgggattggggagccagggctgagggcctgtagggccccctgtctgtgcctctagaggccctgagccacctcctgcagtgttttagatcccataagcaagagacagaattgtgcatggatggtgagaaaacatgaagctttttatttgtaaacagaaaatggcagggctcactgtgtggggctggggacagcgctaggcctgctttaggccgtgcaccccaacctggggtgttccaccaagaggggtacagtggcctccactgtgagtatgtggccatcctctggctcctgattgctgagttcctgattgctgtctttgcgtaacttaggaaccccgatgaagagcccgtgctcatagctccgttcctgacatgttcaggaacgcctctgttgaggtttttctctttggttctggaattcctgggtccctttgacccctgatgcgtttgttttgggtgttgatgagcactggagctgcttccccacagggatggggcattggggagattccgacacagcagggccctcacccaggaggctgctgtgggtgctggagcggttgcttccatggagctgggattcctctcatttggggctgtaggaaggggtctttcctctctgtgctaacagttgtttgtttaaaaagaaaggctgtttaaacctttcaaacttaaaacttctttttttctttggagatggagtctcaccctgtctcctcccaggttcaagtgattgtcatgcctcagcctcctgaatagctgagattacaggcacatgctaccatgcccagctaatttttgtagttttagtagagacggtgatatggtttggctgtgtccccacccaaatctcaacttgaattgtatctccaagaatttccatgtgttgtgggagggacccaggggaggcaattgaatcatcgggctggtcttttctgtgctattctcgtgatagtgagtaagtctcatgcgatctgataggtttattaggggtttctgcttttgcttcctcctcattttttctcttgccgctgccatgtaaaaagtgcctttcaccacccgccatgattctgaggcttccccagccatgtggaactgtaagtccaattaaacctctttttgttcccagtttcgggtatatcttcttcagcagcgtgaaaatggagtgcacacacacgtcagcactgtgggcgcacacacctgcactcacacattcatcaggacccatgggcacacgtgcacacacacgtcagtcctgtgggtgcacacacctgcactcacacattcatcaggacccatgggcacacgtgcacacacgtcagcaccgtgagcgcacacacctgcactcacgcacacacctgcactcacgcactcaggaccgacggacatacgtgcacacacacatcagcaccgtgggcgcacacacctgcactcaacgcactcgtcaggacccacgggcagatgtacacacatgcaccagcacccgtggacacgtgcacgcacacatcagcacccatgggcatacatggatgcacacatcagtaccatgggcacacacacatgcacccactcccgatggcttcggcttgctgggtgcctgcttcgccctcgggtgagcaagtctggaggcaggcacttggggtggggccacagtatggttcttaggagcccagtgtcccctggacccacttgctcccagccttgggtcccaaagtgctgctcccactggtctctgtgccccacccatcatgggcagggctgtctgaacagggcagagtcacgagtgatgcaagggtggggtgtggaggccttgcctagaggcagcagccagctctggcttggctgggccttaccttcactgtcctgctgtgagacgcaggagccctgggggaggacggcagtctgtatcagggcagtggtgaaactgcagattcctaaatgtgatctggagacgactcttgctggagaaatctacccaggtcccttgggtctgtccctcccttcaccctccacagtcagggacaggctgcgtggtgtgcctccccatctgtgcgtggcctcagcgcagcaggcctgtcctgcccattgctaaaggtagagcccggcagattcattgtgtggtgagggcttccccagacccaccaactcctgtgtcttcccatggtgagaagggtggggtctctctggggcctttttttttttaggaagtcactgatgccactcaggtgggtgcccagctccccacctgatctctggagtggccccttctgctggaggctgccccaggctggatgccgtggcctgcagaccccccttcttgcagtccctgggcaggcagcacccatgcgcacacgtgcacacaggccgtgagcactgccctgtgagccaggtggtggtggggggtgttggggctaaggtttggttagggcccgagtgcttgcgcacccccccatccaatttcccatggtgctgggatgctgccgcctcctggaccctggcgttgaagtgccaccttcatctccctccccagacagtaagctccagacaagggcaggctgtggccgtcactctggccagctgctcgggggcttggtggctgctgggtggtcgcctggactctgccctcctgtctcctggtgtcccggaggggccttgctgggctgggccctccaccgccccattgggcgcctgactctcagggcgcagtcagttctttggggatggccctgatctctgagcgggactgcctctggcctttcttctgcatcccctacggaacagcagcctgctagacgccctgaggaggcaggctgaggggtggaaggggcgtggccgtgcccagcagagaccaccctctgatgacggtgggcgtcctttccagcccctctcggggcatcgcttcatcccttcccccatttccttcctggccctgctctccaagtcttgtgtgtgtggtggggcctggcttccctcccggcctctcgcctgttcccgcccatccctctctggttctctcaggcctcctctgggcttgccaggaatgtaggggaattagggggagggggacacaggaaatgcctcccctcctctgacaacagctccagctgcagggggaggggggaggggagagcagagtgggtgagacgagggagggctgaaggggggagtcggcttggggggagagtgttctcctgcccacccaggcactgggcgtggcccagccccacagacagaacagttctttcttccttattttattttttattagagacagggtctcactctgtcgcccaggctggagtgcagtcgtgtgattggcctcaagcgattctcccacctcagccttccaaagcactgggattacagcagtgagccagtgtgcccagcctcttcctaagtttacaccagtgtgggcatccagtgaggggaactggcctgtgatgcggtggtccttgtgacatgtcaggcagttttagagtagggtttgttaaaacatgggttaaattgggccccacccccagccctccactcctcagccattcaggagaagcgcgaggcatgggtgcgcgaaaattctgagtctgccttccacctgaaccccctctggaaggtctgaccacgggctgggtgtggtggctcatgcctgtaatcccagcacttttgggaggccgaggcgggtggctaatgaggtcaggagttaaagattagcctggctgatatggtgaaaccacgtatctactaaaaaaaaaaaaatacaaaaattagccggcattgtggcaggtgcctgtagtccccagctacttgggagggcgaggcaggagaatcgcttgaccccgggaggcggaggttgcagtgagctgagatggcaccactgcactccagcctgagtgacagagcaagcgtctgtctcaaaaaaaaaaaaagtctgaccacagccccttctcacaagggggctgccccttctaccctcgttggggaaggcctggtctgctgtaagtgcagtgaccggacattaaaataccccggaatggtcttggaaagagccacttctgggagtcttcccttacccgccacacaccttttaaagagaaacctgaagacacctgagaagacaggcggcggcggcgatcttcagagagaagatgcccgagaagacaggcggcggcggcgatcttcagagagaggacacccgagaagacaggcggcggcggcgatcttcagagagaggacgcccgagaagacaggcggcggcggcgatcttcagagagagagatgcccgagaagacaggcggtggcggagatcttcagagagaggacgcccgagaagacaggcggtggcggagatcttcagagagaggacgcccgagaagacaggcggcggcggcgatcttcagagagaggacgcccgagaagacaggcggcggcggcgatcttcagagagaggacgcccgagaagacaggcggcggcggcgatcttcagagagaggacgcccgagaagacaggcggcggcggcgatcttcagagagaggacgcccgagaagacaggcggcggcggcgatcttcagagagaggacgcccgagaagacaggcggcggcggcgatcttcagagagcggacgcccgagaagacaggcggcggcggagatcttcagagagaggatgcccgagaagacaggcggtggcggagatcttcagagagaggacgcccgagaggacaggcggtggcggagatcttcatagagaggacgcccgagaagacaggcggtggcggagatcttcagagagagagatgcccgagaagacaggcggtggcggagatcttcagagagaggacgcccgagaagacaggcggtggcggagatcttcagagagagagatgcccgagaagacaggcggtggcggagatcttcagagagaggacgcccgagaagacaggcggtggcggagatcttcagagagaggatgcccgagaagacaggcggtggcggagatcttcagagagaggacgcccgagaggacaggcggtggtggagatcttcagagagaggacgcccgagaggacaggcggtggtggagatcttcatagagaggacgcccgagaggacaggcggtggcggagatcttcagagagaggacgcccgagaagacaggcggtggcggagatcttcagagagaggatgcccgagaagacaggcggtggcggagatcttcagagagaggacgcccgagaggacaggcggtggtggagatcttcagagagaggacgcccgagaagacaggcggtggcggagatcttcagagagaggacgcccgagaagacaggcggtggcggagatcttcagagagaggacgcccgagaggacaggcggtggtggagatcttcagagagaggacgcccgagaagacaggcggtggcggagatcttcagagagaggacgcccgagaggacaggcggtggcggagatcttcagagagaggacgcctgagaagacaggcggtggcggagatcttcagagagaggacgcccgagaagacaggcggtggcggagatcttcagagagaggacgcccgagaagacaggcggtggcggagatcttcagagagaggacgcccgagaagacaggcggtggcggagatcttcagagagagagatgcccgagaagacaggcggtggcggagatcttcagagagaggacgcccgagaagacaggcggtggcggagatcttcagagagaggacgcctgagaagacaggcggtggcggagatcttcagagagaggacgcccgagaagacaggcggtggcggagatcttcagagagaggacgcctgagaagacaggcggtggcggagatcttcagagagaggacgcccgagaagacaggcggtggcggagatcttcagagagaggacgcccgagaagacaggcggtggcggagatcttcagagagaggatgcccgagaagacaggcggtggcggagatcttcagagagaggacgcctgagaagacaggcggtggtggagatcttcagagagaggacgcctgagaagacaggcagtggcggagatcttcagaaagaaagcccagagttccatagtgggcgggtgggcagtatttcggcttgtgtggcaccagggcagggcctccgaacccatggaaagccttgcttcccccaagcccgctggctcccagccctccaccctcatgatagggcctgggtaggggctgctggtcaccctttacccccacccaggaaaaggtcaggaggctgggctccccgtcaaggagcggtttccagggacaccggctctcgggggcgccagtcctgtccttggcgcccagcacatgctactagtgacattcgcaagggtgggtctggttctcagcctccgacctgtcaccccggtgtgggcccagtgacctcagtgagctcctcctgtgccctaagctgagccactgtgtacactgaagaggaggctggggtcctgtgtgcacctggcccgcttcccttgccggtgctgggagacgggagccagtctcggaccctcatctgccagcagctcctgtggctgtgggggcgcaggcatcttggctgactagggaggatcccgtgggaatgaccccacgccatggccagggaggcgcccccacccggcccaaccgcctttgtcggggatcctgagaggctttgtgcggaggctgggtcccaggctgggttccgagggtgccggtgcgcccctcctatgggtgaggctgtctgcttacagttgaacacttctccccacttctgcgccaggcctcactcagtctccccagcacggagctcttgttgctggcccagggcctgtccaggtcctttgacagggcaaggactcagagcctcaggggggggagggcagggcctcctgaggagtatgtctctgtgaaaatgggggtgaggaggtggcaagcatcgccttttgaggacagagtcttggagaggtgttggctttctagggagggccctgtgattctcctgcaaccatgtgggccggggccaggaccaaagccatcgtgctgtcgctgtggatttggtggccgcttcccctgctcagatgttgtactgcaggcctgggccttggcttggggtctctgtgtctccatgttcaggacaggcttgtggctttgggtaccacgaggggccatccagcccagggggcttcagggagctgcccctcaagtgcatgtggggtgctggggtgcagccctgctgcccatggcccggaagtccaggcagcactgctctggttcgaagctgccccaagggtacgggaggcccgtccactagaactgaggcctggcaccatgttgtgtcggttttcatggcgagaaaacatcgtgggcgtctgctggggctggaggaggcgggaggccgaggcagcaaagctgacccgctggcgggtgggggccactgtggcgtccccttcctgcaggaggcggggaggtgcttgtttccctccagagctgctgtctgcccgcagctagtgccctgttagcaggtgcagtgcccgtgccatcttctccccagacccagaccctccccaactcatggagaccctgtcctccgggccatcccccgtccatgaatgcccggggcttggggtccatctcctgtccacatggacctcccctcttgggtgtcacagctgcatcagaggccccagaggccggccctggggggctctggccccaacacagcgtcctccccgttccactggccggggctccctcaggttgctgccctgcctctagatccctgatccctggacccatgctgccgagacgtcctggtagggttgagttccctcctctcccaccccgaggcggcctgagaagagcctcttggaggttcaggtgacctggcctgggtcagcacagtagaggcggagctgccctcagacctcttttgtaacagttatctcatggaaacctaaaacctaattgggcaacggcagctccgtgtgaagtagagattgtctggaagagatttgtccctgttctgtggagcagggcagatgcagctgaggtgcctgggggggcagggacccttccccagtgggctcaccccagtggtgtgggggtggtagaattcaagctcacaccggcccagagggcccgctgtccgtgtggacctcctgtgactgcatgggcctcttgcggcggctccctcccgccccacaccggcctatgagccctccctggcccctgggtggctgggagggctccaggcagggaagagtcagggaggggtggatggccggcgtggctgtaagaatgacaggtggacacgggggcccaccttggcctgtgctgggggccccggtggctggagagtgagagtgggtgctctcactgagggtctgaccctgctccgcagtgcagtgtggaggtggttttggtgccacacacagcacaggtgcaccatgcgggcctttctgatgatcagaattcataagtggttttattttgtaaattaacaggacagaaaagcctttttgttcttgctaaagttttatgatttcgtgtttgggccaccagggtatctggaggctgggggcagtcgtggccagggtcagagtctgggttggagataggtgtcatgcggcagttggtgtggccgtgtggacttgtccccatctgtctagtaaatttccatctgccctgacgtcagctgcctttttgacatgcatttggaaggtgttaacaaatggacttagattcttccaggccggtcgcagtggctcacacctggaatcccagcactttgggaggccgaggcggctggatcacctgaggtcaggagttcaagaccagcatggccaacatggtgaaacccaatctctactgaaaatacaaaaaaattagctgagcgtggtggcgggtgcctgtaatcccagctactagggaggctgaggcaggagaattgcttgaacctgggaggcggaggttgcagtgagctgagatcgtgccactgcactccagcctgggtgacaaaagcaaaagtctgtctcaaaaacaaacaataaacaaacaactcttcctttgaaagttttgttttgttgtttttgttttttttttgagacggaatcttgctctgtcacccaggctggagtgcagtggcgtgatctcagctcactacaacctccgcctcccgggttcaggcagttctctgcctcagcctccctagtagctgggattacaggtgcccgccaccatgcccagccaatttttgtatttgtagcagagatgggggtttttaccatgttggccaggatggtctcgaacacctgacctcacatgatctgctcatctggacctcctaaagtgctgggattacaggcgtgagccaccgcaccagccagaaggtttttttttttttttttttttgaaacggagtctcgcactgttgcccaggctggagcacagtggcacgatctcggctcactgcaagctctgcctccccggttcacgccattctcctgcctcagcctcccgagtagctgggactacaggcacgcactgccacacccggctaatttttgtatttttagtagagatggggtttcaccacattggccaggctagtcttgaactcctgacctcgtcgtccacccaccttggcctcccaaagtgctgggattacaggcatgggccaccacgcccagcctactgttcatctttaccttgtgtaatgccagtttaagacgcaaatgcaggtcgggtgcagtggctcactcctgtcattccagtgctttggaaggacaaggtgggcagatcacttgagcccaggagaccagcctgggcaacatggagaaaccccatctctacaaaaatacaaaaattagctgggtgtggtagtgtgcctgtaggcccagctactctagaggctgagaggggaggatcacttgagcagcctgggaggcagagattgcagtgaactatgatgatgctaccgcactcagcctgggtgacagagtgagaccttgtctctttaaaaaatcataaaatgcaaatgtaagagtgtttaacttgtggaatcatcaaaattgcacagttcttgatttgaaccccaaatataataattaaagtgcgtgtgcattttattcttaccacatcagggcaaacgctgcccaaaatgaacctggctgttggagttcgcttaactcacccatgtggccacgcagctctcgctctgagtgaggacagactgcgtgtgggggctgtgggcgcctgtctccctccctcccaaggctccggtcgtgggctagtgggagaaagtgactgggtgggaccaacgcgacctcctccactggacgctctttacacgggctgggaatggcagtgggcttgcatgtggcgtgtgccacctctgctcatgcatgctctgtggtcacggagaactttgcttataaaagaacatcttatcaaaggtgaaactgttcagaatgccaatgatggggacagagcgttaagcccaggacatggctgcgtgcccacaaagccagctctggatggaaaagtaacgagtggagggcgttttcttcccagacccggtggtccagccgtgagtgtccagctgcaggccccacagcagccagctctgggcgaaaatctagagggcccctgcgcaccctcccgcccggggtgccctggcccagggtgcacctgtgctctggaccctgggccgtgcggggctccagggcgcctggagactgccattttgtgtgggaaggtggaggcgacttgggaatgcgtttctttagattttaaagatgagagagtgttggccttggacaggaaaaattccaatttggtgagaaatggaaatatccaattttttttttttttttgagactgagtctggctctgtcgcccaggctggagggcagtggcgcgatctcggctcactgcaagctccgcctcccgggttcacgccattctcctgcctcagcctcccgagtagctgggactacaggtgcccgccaccacgcccagctaattttttgtatttttagtagagacggggtttcactgtgttagccaggatggataatgtccaaatgttttatccaagtccaaatagcagtgttggtggtaggtgtgctctgcctgtgggtgggggtggtctctgtctcaaggtgggctacgagggtctgccgcagggggggtgtggacgggtcttgcatgcgtcaccttccctgtgtggggcgtgggggtggtctccccctagaaggacagggcttgtggcagccgtgagatggatggattcccagggatctcccctcaccttgggggatgagcccaggctcctttctggggtctccagtgtgtccccgatggaccagcttcctgcatggcaccgccctccggccccaccccgagccctgagccccgccttgagccctgggcgctcctggccctggcctggcactcaagggctgctttcagggctgtttctcgtctgtcttttttcttttctttcttttttttttttcttccttgagacggagtttcactcttgttgcccaggctggactgcaatggcacgatctcggctcaccccaacctccacctcccgggttcaagtgattctcctgcctcagcctcccaagtagctgggatcacaggcgtgtgccaccacgcctggctaatttttgtatttagtagagatggggtttctccacatgggccaggctggtctcgaacttctgacctcaggtgatccacccgcctcagcctcccaaatagctgggattacaggtgtgcaccaccattcccagctaatttttgtatttttagtagagacagggtttctccacatgggccaggctggtctctaactcctaacctcaggtgatctacctgacttggtctcccaaagtgctgagattacaggcatgagccactgtgcccagcagggctgtttacttaaaggtacatgttccgatccctgaattcggttttattttgaggttaggagtgagaacacgattggttgtcgtcgtttcctgtgggagtggctcttttcagaggcagacagttgtctttgctcgtgcgtgcacatttgtttgcatgcgcgtgagacccccaggtggttttgctctgggagtcgtgggatgtgttctctgctcccttcccttgtcctgagtggccttggttggccacagagtcagctggcagtggctgtctgtgggtcacctccacacatggatgaaactagcctgaggtgggctgttgttggcctgctggcatttttggggtcatggcagtgccctcaggctggtgatagtgggggtggggaccttgtctcaggtaccaagttcgtcttcatcctttgatcccctcttccaaaaactaccccctccccccgccacgtgtgtgaggcctgcagtggtgtgcacagaagccacccttgggcctgctgggtgacaggtcccctccaggtgacgggagctgcctcgctcttcctgcaggtccccggtgccgcctggttttcccgaatcgcatgcacctgtcactgagctgtcagtgtggtcagcttgctgcacccacccgggaagtggagctgggggaaggtcatgttctgcaggagacctggtggctcaggccctcaggacccagctgcccctccccgaggagcagtggttggtgagaaagcacacagaaggcagaggctagagatgcagctcctctgttatgttgagcctctctaggcagggagctcagagacccggaggtggccctcctgcctcctctctgtcaggacttgacacctgtctcagtggccatggctgtttgtcttcatccctcttcggtgagggtggcaggcggccagatgcccattacaggccacctctcctgccagccagtcttcgagggctggtcaccacgtggccactttgtgaggcccctcctctaagatcaaatgtggcactgcagagctacaccaaccccgagccccgcgcagggcagggcaggagaaccaagatcgtgggggtgggggggtgcagggcagggcaggagaaccaagatcggggtgggggtgcagggcagggcaggagaaccaagatcgtgggggtgggggggtgcagggcagggcaggagaaccaagatcgtgggggtgggggtgcagcacaggtcgtgctcccggggctggctgtagcggctctcccctcccccgagcccaccgtgtgcttcttgtccagccttttgagatgaccacagctctcagtttggccccacagcagcatctgggttgacgtccctgatgaggtttggaaacagcagagaaggggttgtcctcttccaccaagagcctggctggcctggcctccctctgggcagcacctggctgggctgactgggcagagggaaggggtggcctggccagggtgagcatggggtgcttgccactccacagagggggtgcaggaggcgcctccaggccacgttgctccaggacatgccacctccacagccccctccttggagtctttcctcaaggtcttaggatggctgtttgtgccctagcacagagacccttgccctcttgtgtggcgccgggggtccctgttggtcagggatgttcctagagtggggagggagtcggtaaggcaagggtgatgttggttgtaaggggtggagtccttggtcttaagagatcaggcagggcagccctgggctgcccccggcagagcctttgccccaggcaagtcccggggctcctgggaagaggctacttctcagcctcttgagagggcctccagggcacaggcagggagcagctgtgagggtgtggctgtgatggggactcttgactgcagtgtggatgtgagctgattgggggtaggccagccttctgtgcgggacacttgggaactgaggggacacagccgccaccctgcactgctcagcctgagcacctctctggctgtttggtgctgcacgtgtttctgggcatctgagatgaggccccagggcctttgcttccagacaccaggggagagagaccagccccagaacaacagttggcgggtgggctggggtcgtcagagcttctgacctcatcaggggctcccccagagttttctgtgcgctgccgtgtgtctgggccagcgctgggggcaagcgatgccttctgtggtttgaggtcttgtaggcaggaggaggaggaggaagagggcacctgctgagatacttcactggtctgagggccccttctgccccagctagcgcttgggtgagggttgggcttgcggagccgtcctgtaaagccggggatggcaggacgcattgtcaccccctcctgccgctcttacgaaacactcttaattgagtccgattcttggtgaatcagccttccaagaaccgcgaccgcagcatcctgtgccgcttctgtgttccgcatttttctctttctgcagcgtttcctctcattctggatggaaaggcctgtttgtctccctcaatctttggcgagggtggcaggcagccaggcggccattacgggccgcgcctcccaccagccagtcgctggcaggagcgtccggggagggagcagaccccgttcaccctcaccccagaactgaagcagcgaggggacccagacgagctgcgaatgcaggcgctggggatgctcatgccagcttgctgttcttgggagtctgtttattcttttaagctatttcagcatttaccttcagtagcatcggaggaaaagaacgatacattcgccccagtgtgtcccctgggggacctctggctaattttcggattccgaaagtgaggttttgcagggctgtgtggccactcctttgtggtcggccccagtgtcatcaggctggtttcaaatctggggtctgtggttcgaggctgagtgcagggctcaggctggatggggagggtgagaagagtggggccagacttcccggggtcagcacacacatctagggtcgtcatggagcccatggcagcactgcctggccattggcccctggtggacgcctcagaccgaggtcccaggagaaccccagcaaggttggggctgcagagggagccctccccgggacagcagctggaccagaacagaagctgggccctcccccaccccctcagtctctgcagcccccaccctccttccagcaccttcccccctggatggatgggtctttgtgttttgatgccccttggctctggcattgtgggggggccccctggggcatgaggaagagggccagtgccaaggccccgagggagcgctactaattgctactcagtttccttagaaagatttggctttttgtcatcaacagcgctaaagtaacagcaaagatgacctacttaagcgaaagaaaaatccgagtgaacctttaaagctggtattctcacttcattttggggcttggggttgtcttgcagattcaatctgtttcctctgtgccacaataatcagaaaataggttaatttaagcccaatatgaaaagtgaattatcatgtgtgaaatattaatggcacttacaaaaatagctttataatttcttgaaccgtgaaatcttcagagaaggcccatagctcacgtgagccgattcttgagtgagggtatttgggggtgcacctggaggagacagcgatggtctcagcagggtttgtctctagagtgcctcagcgcgagcttctgccagtccccggagaggagtccccacgcctccttgccctgctcagggctgcacgggagttgccacgtaggagagcacagcccaccttgggcttttggggttcgggcttttggagtttgtccaggctttggggtggggctttgcctgtagaagctctgagctgtgctgcatggtagggtgaccgcagtgggctgccctgggtgccccatgaaggactgagcagtggggtgacccttcatctagcagacgttcatcagggacctgctgtgggccaggctggggtcacactcagaactgactgcagccaggtggagaccccacctcgagagctcctccttcctagctgtgtagcccacaccccctggggagccgtagcagtgtgggggcagctctgatggaggggtgtgtacctggccacagctgtctctgggctgtggtcatcacccacaggtccttttcagatgcggtgcccacctgggtgtgtggacatgacccttgcctaagggagggagagaggaaggcctggtaccaggcagtgtcctctgcctgtgcccctgctggggaggacgtgagggcctgtggcttttaggaaccttgaggaggtgggggtggtcttctgacgccggcggggctcctgaaggtgcaggaaggcacagtttgtgcagagtccccttcggaggaagcaacgcctgtccctggcggggccgctgagccaaaggccgtgtctcagtggcaccctctcccagccgaggatgtcggcaccatttgggcccgtggacttcctccagtctctgggtggtggtgagtggggcctgctgttgtctagcagccactgttctgtggggcttcactcctgggcagggtgcacgggagagcaggggttggcaggaacccggcaaatttgtcaataaacctgaacctgaagtcccacaaggacggaggctcagtagggctcgggcctgagcggggcaggccagtgtgagctgggggttggggcaggccactgtgcggagcggggttctggccaccacagggcttttgttctgttgctttggttggcgatcgggactcaccatgttagacctgaggttcgtggtgggatccaccggcgtggccctgggtggctgccctgtgtgctcagggagcagtcacgggccctgagtggtgttgcccgtgggcctggaaggtccagccgagggttggggcctgcggatgtcgcttctctgaagatgagaagccagggcgaggcccccccccaacatctggaaggttctcctgcgtcgccctctccttccaggcacatttggccgtccccttttctgcgtgtctgtccccaccatcgtgccctcttcttctctggactgcgtttggatgatttctttgaacggtttttattctggaaagttctgctcgagcatctggtatctccctggtgtttgggatgtctccttctcattcccccgtgtcttgctttaagctgcgtgtcctcgtgtttccgctgcccctgttcttgggcactgcgttgtgttctgtctgggatccccgtgcaaggcccctgggtctggtggctgctgcccggcctctgggaccgtctacctgtcccagcccccgtttccccgcttcttcagctggcaccttgaaactccgtgccaggtgagcaggcctgtggctgcaggttcccggaatctgtcgtgggttctgggttgtcccttccagtgcaggcggtggtcaccgcgccaccatgggggtccaggcagcaggatggtcatgtgatgggggccactctgggcttttcattctcctttcatctgtggcctcggaggctccccatgttttctgaggtgcacagaacatggaggggtgctcatctcatgtcagatattggaaggatgtcgtgcaggaaggttcgagggtctcggggtggtcctgagaagccgatgtgataggtgcggcagcttcctcttcccctgagcgggggcttccagagcctccctcccactggtgcccatggggtttgagcctgatagctccgcaggattcagctgctgtgagtcacagccaggatggagaggtctaaggcaggcctgatgccgggcagggcgacatttctagaaaaggtttcatctggtgatctgctaaatggcatgaaaatcacaaaattggcactcagtgaccatcaggctggctgtgtgtggctgctctcctcaacaagcaaatggctgcccccatccagagccccgactcccgctggcctcccccgtgcggggatgtggggaccagggcaggccccagagaccacctgacctctctggcaggaagaagaccacgtcgtgccgtttcctcctcccttgagcccgttagctgtctcggggaaccggtaagcccagggccaccttgtcacgtcctccactgaacgtgggtccacgtagatgccagccccttggtcttgcccagaagttgtgggaggtgctggttgccagggatggctatgcatgtttgtccccatggcagggaggcctctgggggcctggccctccccccgctagctgcttctcacatttttgtctccccgagagccacctgctctcccagggccctcaggcccccgtctgccagtctcctggcacctgggctggggtctgcgccaggcaactcccacagcagggcaggatccaccctccacgttatcattactgccatcccctgtgcctgggttggaggccacgcccacccagtggggcccctctggaaaggagacttgacctcagggtggtggcagggctctgtgggatgcccctggtgacagggaccagaatgttccctaaagtggatgtcaggcccctggctcagatggagctttctgttcttgatgggctttagaaggtgaaaaactaggcttccagaggtgaagttgcactgtgggctttgtggcaggtgagcgctgcctgaccctgaacagctgctaaagactcagacctggagccttcctggtgtcctgtgtgtccacgcaggtgtgccagtgtggcagccctgcgccaggagctgcccctgcatgtcatggcagcatccatgccagccgagcgcccctctggctcccaggcatctcatcctgtctggctctgagggccgtgctgcagtgaaaaccattcaccttgacagtttggctttcgaccaagaattcactgtcatatttttgatttttaaaattaagactgtattcagatataatttgcgtaccataaaattcttccttccacagaatatggtttaatggtttttcagtatatgcagccatcatcatctaagttgagaacatttttgtcacccccaacaagaagccccatgcacatggtccgtcactccccaggccccaaatcccagccagcactgatcttggccattggcctgtcctggtcattccatagaagtagagccacgtgactgtgtgtgtgtctgggccacgcgtggctgtgtgtatgagagccatgcgtgactgtgtccgggtcacacgtgactgtgtgtccgggccacgtgtggctatgtgtccaggccacgtgtgactgtgtgtgtccggcctcagcacagtattttcaaggctccttccttccttttcatgactgaatcatactccattgtctgcacagaccacaatctatcccgtcatttgtctctggatgcttgggtggctgcactttgctgctgtgagcacttgtgcacaagctgtcgtgtggatgtgtgttttcagtaacctgcgtgtacgccgaggactggaattgctgggcgatgtaactgtgttaagcttccgaggacctgccagactgttttccacagcagctaaataattgtacgttcctcttagcaatgcataggggttcctgtgtctccatgtcatcaccaacacttgtccaaactaaaaaattctaggccaggcgctcatgcctgtagtcccagcaatttgggaggccaaggtgggcagattgcatgagttcaggagttcaggaccagccagggcaacaaagtgaaaccttgtctctaggaaaaaaaacaaaaaaaaaaaaacaaaaaattagctgggcatggtggcacatgcttgtagtcccagctactcaggaggctgaggtaggaggattgcttgagccctgggtggttgaggctgcagtgagctgagatcgtgccactacactccagcctgggtgacagagcaagactccgtctcaaaaacaaacaaacccagttctagccatcgttgtgggcgtgagttgacgtctccctgcggtgtgattgcgtttccacagtgaatgatgtcaggcagctttgcatgcggttactggatgttagtatcctgtttggagaaatggctactcgaattctctcccatttggaaattgggttgtgttttgtgttttccttgctgacttgcagagttcttcatgtgttctgaatctggtcccttaccagctaccgggtttgcacgttttcccttgcatcctgtgggctgtcttttccctttctcgatggtgtcctttgaagcacaaagacgtcgtgattgttttctgggaagccttgttgttgtgttttctctctgttccttgtgctttggtgtcatggaagcacttctgcgggggcgggagtctggactgaggccgccacgttcctgctgtgaaaaccttcacgtgcgctcgcagcctcggctctacagacggttcagtccgggaaatggtttaaggaggccgtgcacagaaacagtctttgcagccagggacatgagagcataccgtgctgttcccacaaggcccgtggcctctgcaggtgagaattggtggcctcccttgaaaatactgaatggaggtgccaggcacccgcacaggctcttggtgtgggcataggccgtcttccacttgaagaatgtggcaagatggtctgaaaaccacaaagtttgtgtttggagacacggtctcagtgtgttgctcaggctggagtgtagtggtgggatcatacctcactgcagcctcgaccttttgaggtccagtgatcctcccacctcagcctcccaaggagctggcattacaggcataagccaccacgccgggcccacggctgaagtttgggttgtatccttttaaggaatagcagacgggttttcagccacaccgaagagaacctcagcgtagcagagtgttgctgggccatgtgcttcaggagcagggccacaggcaggacctcgagtgcccagcccgctcaccacgctgtgggcggcctcttgggaatgtcagaacaccagcacaggcgatctcctcggaacccagattgtgggcgatcctgccgctccacctgctgtggccccagggttgcaccaccatgtggactgtggctggcagcttctggaggcttcttggtgcctacaacatctgcgccactccacagcgttgcctattggtggcagccatcccctccataagcccgtggcccctgtacagagacgaattggcgctcacggactcaccctgcgaggcagcatctgcgtctgcaggacttcccggcccttggccgcacatttccctccagttcccatcatggcagctgtgcctggttgcggatgctgcatgctgaggagaggaggcgtgggcccgcccggtgtgcatgggcaggtctgagactggccactcccatggcgcatgcattcccctggagggtccccttgccccgtggctgcagcctggcaggagaagacgctgaggggacgcacgggaggggttgcagggtgggctgtgctgtgtggcaggccttggggtgtagccgcaagctgtgggtccatccccccgcaccagagtgcagttttgacaccgggtggtcatgggccgagcatccatgcaggtgtggagacggaagcctgacccacagagcttggtggtggcccctggactgacctgtgggctgctcaaccgctctgccactgtgcgttgttcacatgtgaagccggcgtcacaaaggcctcaatgtctgtttcagctggatacatgcgcgccctcgtgggggcttgagggcacactggccgctggacactggggtcccggggtgactgaggctggtgccctcctgacaggttgctgggctgcaagttgaacagaaaactggttttcttcactctgcgaagttccctgtggttgtccctggggttggagggagttgtgttgacatcatcatggctgctgctgtgcgcctctcccttggagcaggtgtggtccccggctcctggattggctgcccatgctcaggatggtctggggtgtggccgtggcctgtccccgggccggatggctttctcagcagctccctgaggcagcatgagcagaggcgggaccctgcccgggtcctgtttcccccttgtatcctttggccctaatacggggtcccgtttaccaatgagggcaaagagaccagtctaaggggaggctgaaaactcacaggcaggcctgtctggccttggggtctgggtgctgcttccaggcagaccacatcccaggtgaggtgcagacattcagagacagacgtggccgatcctggctgctgtatcaacgcgcccaccaaatggggccttctttgatcatcagtcaaaagcaagaatgtgcctgtggtgggcgggcgcgtgtgccagcttccaggccgtgggctccttggtgcccagagctcaccctgtggtgcttgcccactactcactcccgcctccccggagtcttgccctggggggtcctggtgtgggagctgccttctctagttgggtggagccttgcctgctggtgcctgtgagccctgggtgggtggatgccgggtggtcgtggaggttcacagcaggctctatgtggttgttttgtgtggatttggggtgtgaattctctcagcaaaggctgactcagaccccagtgttcagaaggttcaaggaagcgaccgtcagcgccgagtggccagcagggcggggatgcggcgttgagccccgtcattcagcttcagtgtggagaaggcccggagctgtgggcatcagctcggggacccgagtgactgtccctgcctcggggagggggggggccacacgggcaggcggggcagcagcttgtgcccatgtcctcctcacggactctggaagtgagaggcgctgaggccacagtgggggaagtggcccagctgacgacccgggctctcggtgccctgggaggagctgttgttaggacatgtgcagactgggttcagcctgtctggagtggctcaggtgcctggggacagaggccagctgtaaccgctgctgcactcggttctggattcagtgccctccgcctctgcggcgtctccctcggcagctgtccaggactccagcctccctgccagggtaggggacatggagcgtctccttgctctggggggttgaggtcttctgtgtttggaccctgtgggatctggcaggagaagcagcccccactcatgttgtgccaggggcctggggaagggagatggcagttctgtgacctccagactccctttccttattgcaggggatgggccagcgtttcgccctgagcatctgcacgtgtcaggcaggaaagggtccccaaggccttctcaatggctcttctctgttcctggcaccttacaggcctgaaacgcagggcccccaagggtggggtgtgcatttttggagagcgtcttttctgagactcccccatggggagctggtggcttgcttgtggcagtgtactgtggctgcccagtcctcggcaggcatccactgctggctcacctgtttgggccaccgcctctgcataggtcctgtgggctttgctcaggaactgttccgtcagagggcctagggtgtccacagtcttgggcccgctattcctcagcccagccctgccctgccctggcaggggggcacctgtccttgggtgcaagctcacacgcgttgcccgggtgcctgctggccaggtagcttgcctggtcatcctcggggtgtggggaaggaccccaggaggggaagtggccgcggggcagcgcggtgtgtcgtctggcctccgctgtgtaagctgacagtggcctgaagggctttgggatggggcagccccttgcaggcctatccaggcccagccccattgctttggtgtgtcaggtccagagccgtgctcctgcctcgtggcctgtgggctccaagggcgggttttgaagccccaggaagggtcacaccagaggcaagcggtcgtagctgctcttcccagagtaagactcagccgtctgtcactgggtgtggttttgtccctgaccgacagctgacactggggcccccaggggccttggtagggcgggtggcatcccaggcctgaagacggctgtctgcttcctggggctttgagaaaccaatactgctcaggtgacagtccctctgagagtgtcacttcctccgcccacaggggcgcagacaccttctattttacacgtttctctccgtttctctgatgctgcagagagcccgccctgagagccgggagtcgcctgatgaggggtcggcaggggtcttaacggagtcatgtctccgaaggctcgtcctggctccctgaagaccaggagcgtccctggccccaaggatggccctgagcccatctgcctcaaccctccagatctgcagggtcctcggccaccccccactgagcggattgggctcggggccccgggcctacggtcctcccgccacctccacggggcggctgttggggccccaccaggcagagccgtgttctcaggcgttggctctcatggaggtggcctgaggcatctgactctttcccctcaaggagtctctgagtctcccggagtcagcgccggctgttgtggcttttccccgggtgataactgagccgaatttccgcgcccgcttcagtggctgcttagacaggaagctccacccagccgggcgtcctcggccttctgtgcctctcgggagggtccgcatgattccggaaggggctctgctgcagctaggatggcacccgcccctgccaggcataggcacagcaccctgcggtcagggcctccgccagacgtcatcaacactcacttcccctcgaaagccgccacatagagggggtattttcagtgtcttttttcctgaacagctattttagtgtctctgaaaaaaaccatccacagccgtgagccttcaggggctgcctgccctgcgtccccggccctgtgcgcccgagcacttatctttctcccttgggcccaggtcagagccaggcacctgcccctcccctggccccaccctgcttgttccctgagggctgcagggtgggtgcacgtgctgcaggggaggccacgggctttggccagatcttcccccagggccctccatccccataattggagcaccttgatggacagcctgccctgcgccccatcttccccctagggaagcagggtccctgctgcctccaggaggctggttcctgatgcagcgtcttctcctagagtcctggaggtgggaagagcccccggccctgagtgtgctctgtccaccaaggcttcctggctgagggcaagggcggagcccccaccgcccgactttgctgcctcctcttgaggttggcctcggcagagtgagtgggacctcacccctgtgaagggccccttgccctgtgtggcctgttctgcattggcctgtggtgtagacctggtgccagctgccctggagactctgtgctgtcctgtggggtctttggcagtagaggaatggcccattttacggagactgccctgtgattttgcttgggaagagaccttgggtctcagttgtgccttgcgggcagcaccgtctcaggggtttccagccgcagggctgtgggagttcacgtttgcctgaggctggatgtaccggctcaggcccccagcacacaacccacatcactcactggctcttgggggatgtgcctcagcacctgacacacaacacctggttctgagtgggctgggtccaggcaccttcgctaagcttcctccaccagcgggacctggttctgggtgggctgggtctgggcaccttcgctaagcttcctccagcaccggggctggcaaggagcgaggcaaaggtgtgtgtggtgccatcctgtaggagccaggctccttggggatggtgtccttcattttgaaaatgtttccttcccatggggagggggcagccagaatgcccactctttaatgcacctgtgccagtggcccacagggacacggtgtcccctccccgcgaccacccctgtgccgcagctgcccttcccagacgcatccgtcgtgagtggctctcgccgtgctgtggctggttgagctgagtgcccagcgctgggcaccctctgaggacacactcgggttctaggaaaggggtttggcaggagaaggacgagggactcctggccaggctgagccgctgtggaaggggagagtgggtcttggtgctccatcccaaacctgctgcagccgtgggtgaggtcacccggaatggcaggacaaggtccactctgttctctcggagatgacttgtccctcagcacagcctccacgtgcctgttgcgcgtggcctaagggcctttatgcaaagtgaacttggtctcctggggggtgccctggaatctgccttctgcgccactcagggtcgtttgtggccggagtgcatggggctctgactgccatgtgccagccacggggctggtggagggaccctgccctgggaaccacaggtgccaacaaaacctttcattgatcgcaggtctcctctgagcctccggcctccataagacccaaaacagatgacacctcttcccagtcccccgcgccttccgaaaaggacaagccgtccagctggctgcggaccttggccggctcttccaataaggtgctgtggggcctgtcggggtccttggggtggtgggtactgggcccttctccttgggcagacccagcggctggcagctccacctgcccgctactgagggctggcacccggcgcagcctcagggacatgaagtggcttgtttttctcctggtcactcacacagacaactctttctcgacagagcctgggctgtgttcaccctcgccagcgcctctctgctttccgaccctggtcccccgcagtgtcagcgagtgagaaagagctctccccacacctcccggccctcatccgagacaggtgagtgggcgccattcacaggtgtttctgatcacgggggaggctccacgagggctgtgcatgcggacgcgcccatgtttctgcaggctgggtgcccagacctgccgccttttggtcagggcagtctcggtgttggttcctttggctggcatcagggagagcacacctagagcgttccctgtgttctgggtggagtcgtgggtggagccctgtctgctgggcgcagcttcttgatgtgttggcctgtgtctggccttcgcaagagacccagcaagcagaaaacgcttacgggttcttagggaactgtaagcttgacttgaagattcggagctgggaaagtctttcctgtttaacaccttcagagggggtgtgcgccaggatgtgtctgggtggtgcttggggacagaggcaccttcccgacacccgcctgcccctccagcttctactcctacaagagctttgagacagccgtggcgcccaacgtggccctcgcaccgccggcccagcagaaggttgtgagcagccctccgtgtgccgccgccgtctcccgggcccccgagcctctcgccacttgcacccagcctcggaagcggaagctgactgtggacaccccaggagccccagagacgctggcgcccgtggctgccccagaggaggacaaggactcggaggcggaggtggaagttgaaagcagggaggaatgtacgtgtgagtcgctttctgtgcctcctccctgtgggctgtgggggtggcactggctgaggggggctggtcgccgggggtgcgttggtggccccatgtttcgcaggttcctccgggagcggcgcgtctccctggtgtggagctgccgggcacttccatgactttgtttctgtctctgcttcctcctcagtcacctcctccttgtcctcgctctcttccccgtcctttacctcatccagctccgccaaggacctgggctccccgggtgcgcgtgccctgccctcggccgtccctgatgctgcggcccctgccgacgcccccagtgggctggaggcggagctggagcacctgcggcaggcactggagggcggcctggacaccaaggaagccaaagagaagttcctgcatgaggtggtcaagatgcgcgtgaagcaggaggagaagctcagcgcagccctgcaggccaagcgcagcctccaccaggtgagcggggcgagtggtgctgggaggtccagggcacgggcagtgagcacagcctgcaccaggtgaacgggcacaggtggtgcctcctcccttcctggctgccccatgcgctcctctctgcctccacctcagtgggcctgcctgggaccttgggggtccgtctcccaaaagctgcagccctgggtatggtgagcccctcagtgtccccaggctgatggacatcccaggaggccactacatttggcttgaccacagctttccccatcaggatcacacaccctgcgtggtggccccactgaggaagtagccatgtttctctggtataagggaggccgggctatttttagtggcagaaagagttgggagcagctgcatggagacagttccttgctctgtgtgctccaggagtgggtgttcacgcgctccgccagcaagacctggcgtctgcaaaacacaggcgtgaggggcgtgcttactaatgcctggtgttccagaaggcggctcccgccaggcctcccgagtaggaaggagagggctcggcccgcacagacacacacacacccacctgcacacgctgcttctctgggctctgcctcacggttctcacgctgcagctccggtctcgcgcctccttttacgttgtttaggtttctttctgacatgactgagggaagtgcggttcacaggcagagctgcctggggagagaggtgtgcaggcggcccgttgttcaccgggccccggcctcgctaaattcacacctcggcggcgtctggcagcttccgcggcgtgggctttagcacaacacaaccccgtcggccctcagagctgcagggttgccgacgtgccctcctgcgcgtgccagtccctcgccccagcacgtcccccgccactgttgtccttgattctggttggaggtgtgatttcccacatacatattcatgtggtgtgtttgcagcgtggggtgtgagtcacacggatattttaatggggagagtgggggggcttgcggaggcgccgggcggatggacgtgtccatctggctgcgtggggagacccggggccctcagatggtgcgatgtctgaggctgccctcctcacattgatgggagccagggcctacttggcttgctgcccccaaggggaacgtggccctagataccgggggaggccccgccgcagcctcaagtgactgactcaggcccccaggtttagcacagctgccacaggcctggcggaaactccggatgggggtctgaaaagcctttgtggggtcggggcaccacacgggttgggctgatggcgcgctgggggcggggctccagggcacattgtcagatagatgaccccacggggtgggctgaggactgctggtcatggtgaggggtgtgctgggaccggctgggcagtgaccccgagccgcctccggcccccaggagctggagttcctacgcgtggccaagaaggagaagctgcgggaggccacggaggccaagcgtaacctgcggaaggagatcgagcgtctccgcgccgagaacgagaagaagatgaaagaggccaacgagtcacggctgcgcctgaagcgggagctggagcaggcgcggcaggcccgggtgtgcgacaagggctgcgaggcgggccgcctgcgcgccaagtactcggcccaggtatgcgggtggggagactgaggcacgcagcacggtgggcgtggagccgccgtgggccccggtggccagtcctgcccagccggaaaggccttggagcagaagccaggcccgggaccacgttccgtgcgtgcccccccgacgggcacagggtgggtggttgctgggccctgcgtctcgtgagcctgtgtcctagcaggtggaggaggggccggcacgcggcactggggagggacagggagcggcgcaggagcctcgggtgggggaagcagcgtcgggccggggcagggcagcgagcaggcgccgctgaccactcggctccctttcagatcgaagacctgcaggtgaagctgcagcacgcggaggcggaccgggagcagctgcgggccgacctgctgcgggagcgcgaggcccgggagcacctggagaaggtggtgaaggagctgcaggaacagctgtggccgcgggcccgccccgaggctgcgggcagcgagggcgctgcggagctggagccgtagattccgtgcctgccgccgcagcgccgccgacaacgcgggtgcaggggggcgcggctgggcggtgcagctccgcccggctccgcccctgcagcccacacagcacaacgtcttaccgtgcctattaccaagcgagtgtttgtaaccatgtagttttggaacccactgcaaaattttctactggccaagttcaagtgagtaagccgcgtcccccaactacagctggagacggggccagctcggcggcctgctggtcctctgcttgctggaacattctaacatttacacttttgttataagctatttaaaaccagtaaggagacttgaaattcagaaaatcaacacatttttaaatgactaacttctaaaagccccaacacatgacgccatctgaagacccgcaacggagtgggggtggcggccgccccaccctccccacccggggaagccatcacagctcatctgcccgcggctgcgtgaggacagcaggggtttttcttcagagtctattttttcagcgacaaggacccaggtcttcctgctgctgccagggagagcagggacagtgccgcgtgcgagatgagctcgaacactgcccgccttactgccgcctaccccgcccgccacgccgccgtcgatgccagcgctgtccccacgggtaccaggaagtgcagagccgcacaggagctgccccggagctgaggggacggtcttcggctcctctgcaccccgtgattctgcccacgctcctccaccacgaggcactgacctgcgtcgggtggtgaccgtggctggcggtcacgccctcagcccctccgggcacacgtgccgcctgaccgggcgacccttttcagttcggcaaacgtcgctcccttcattttgggactgaggctgcagcattggaacaaaagagcattatttcaatttttctttctttttttttgttcgttcatttaaacgtatatttagaactgcactttgtccacaaccttcccttctctttctattccccagtgaactgaggtttttaccgatttatagagcagtcaaatccgaagtgctcgagtgcttagaaaccccctctggtgcttggttgaacaagggaatcacaagaaaacgaaaatgcaaaaactgaacttcgggggtcgttctgtgccttccagcatcttgtacagcaaatcctgactcgtgtctttttacccccaagatatctgtcttcagtagcgactgaatctgccactctcagaataagttccttgcatttattccaaataatctcgtttactctcacctgtttatgcaaattgtataaggtttcttatgcccaagcttgaaaaatgatttcccagtagacaagaggcggctacctatcctacagttacggtatttatttacataagaagatcttacaggagttctttgcttgaatccgttctaacacccgcggcagctgcacgcgctcacagaaggtggaggttacttgcccaggtacagacgacctcggggcagtgacgagcaaagaccagagactgctgagccctcgcatctgggtggcggaattgcctgcggggttttgcccttggtttactgaggggggtcttggttgctgctgaagccccccaccccttctaaagtgcaatgcaaaagggacatcatgtatatgcagcgtttgtttggaattttctttgcttttgttttctttgcggttgttctgtgtgcatggattccacacctctgccgtaggtagatccgtcagcgggcattattaccgtgtcttgtaaagggtcggttttgttatgcaacatgcagaatgctgtttttagccttgttttaccagagttgttttttttttcagttatttcttcaagggaaactaaatgatttagttggagcaaagctttaagtgtgttggcgtgcttctgtgtggctgtcctgtgtcgccaggtcgaagatcacagtgaggtagaggccctgccccatccccagggccgccaggcttgctccgtttgctttgagtttttagaccccagagggagatgagcttttccaagctgtgtctgggccagagcctctccttgcccttgctccatcccgacggtcaccgttgggtccacgcctccaccgccccatcttgccccaaacggaaagcgctgtatctgcagtggcagcccttccccacttcggctctgggagggtccagccagtgtcacctgggcccaccctttcctgcagctgccaggcccgtgcggtcagtgggacccggacgtgggcaggcgagctcgggaccctcccaggcagttcccacagctcttgcctcggctcaccagggtcacttccactgtcaggggcctgagggggcagctgtggctgcagggctgctctggactgaggggtcccaggccccgaggggtgcacgcctggctccccttggcacaggtgcgagtccgtttcttttcagcagaagggggaagaggtgtccgctgtgtgggctgctgactcctctgtgtgtgaggcccttcatctaagtgattgtgtattcagtttaattctcattatatttctatactgaaagaagatttttaacgaagggaaaaacaacagcaataacattcatatctctggagcagctaactcatacacgtaatgtctgcttttcgtacagaactagccaatgtaaaaacagttcacctgtaaatactttttcctttttcaccgttgtattatacatgtatatgctgggtcctttttcagaaactcttttcttacctgagagttgtcttgttttctgggctgtttttaactgaggaaaaaaaaaatgctttcctgccggggggcaggggagacggagaaacccatgtgcgtttcccatgtgaccccctcctccctgtgggtctgagccccggccccccccacctcctcctccctgtgggtccgaaccccggcccccccaccccctcctccctgtgggtccgaaccccggcccccccaccccctcctccctgtgggtccgatccccggccccccccaccccctcctccctgtgggtccgaaccccggccccccccccaccccctcctccctgtgggtccgaaccccggcccccccacccctccctcagcccaccagggtccagggagatgttcgttctcgctttaagtcaggagtcacaaatgacttttttttttcaattaaggaaaaagctccatctctacctttaacatcacccagacccccgcccctgcccgtgccccacgctgctgctaacgacagtatgatgcttactctgctactcggaaactatttttatgtaattaatgtatgctttcttgtttataaatgcctgatttaaaaagaaaagagcttggcatatttatctatttcgctgtgtacctgttagtccttccccgaccccgaaacagatgacattgtacaataaaggactttgagagga

SEQ ID NO: 40 - DNA, 39165 bp, Homo sapiens
gatgtgtgtggggttcggagccgcgccggcacagccgaagggagcgggcgagcggcgacggcggcggcggcgggcacaggtgcggctccggcttacggcggcgacgcggcggaggcggcgggaggccagaggcgctcaccctcctaggagcccgacggcggcgacaggggcggtggggaattcacaaagctcgtcgagcttacccgggcaccgaggcccgagtagggggtttggatgcgcgggtcccgggtggggtcggggccagagggggtcgctaggcgggtgttccacggctgatcacgcttcgttggccccaggcggtgggcgccggcagggcagggcgctgtagttgacgggagccgcggggaccccggagacccggacgcccgtcaccgcccccctcccccagtccagcagcgctccgcggggatgccctggtctcgacccggtccgtcagcccccggcggcgcagggatccgcgcccggcgcctaaactgccctggtgtcctcttcgttctggcccggggctggcgcggggaggtgcagcattaggggcgctgaggtgacacccgagaacttcccagggagagggtgcgcgggggggtggatttccacagtccttcccgcggcccccgcgggggggcggtgttgggagggcacttggggttatcccaggctcgccggtgggggtggggggactcctccctttacttccctccacccccttgcacacccacccccaggcttcccgtgtcccttgttctccctctctccgggttagagataggtgggtggctttgagtgggcggaggacttcagggttttaggggctcccccattctaggtcatgcctcttgctctcttccttggcctgtgttgagtaaggtgtgttcctgtggtggacgaaagtctgtacgatggttggtggcattggtccttaatcctttgggtctgttttaaggtaaagtgctgagagtttgggaagcaaaaatttctatttattggatttcttttggcttttctctcaagaaggaagtggaaaaagagtcttttctttttccctcttcctccatttgcattctttgtgaggtttgtctgccttgtgctttttgtcccggattagtcttgttgaaggatggagattcccaggcgtggagtctatagcttttggcttccattaagtaaaatcgctaacctttttttaagagaaagttaatttttgcctgcagtcattccagaaaaatagtgtacacggactagctgaattaatccacttaaaattgtaacttagttacatatggtagatatgttaactcctatctgatttttttggatgaaactgttgttttgtttttaaataggagatgaagtaatggatttttttccctcccttaaaatggcatagctgagaaagccccggtactactaattgagatgatctgcttaagagtcttcatattctgaactcgaaaggccttttatgttatattattgctcgctttacgcaactccaaattgctttcctatttaaatgaatgttcttctagtaaactggtgttagatttaaagaaatcactcaagcttcaccttggtaaactgaactcagtttaagattaagaaactgatttcggccgggtgcggtggctcacgcctgtaattccagcactttgggaggcccgggcgggcggatcacctgaggtcaggagttcaagaccagcctgactaatatggtgaaaccccgtttctactaaaaatacaaaaaaattagccgggtgtcgtggcttgtgcctgtagtcccagctactccggagtctgagacaggaaaattgcttgaacccgggaggcggaggttgcagtatgccgagatcgctgcacttcagcctgggcgacagagcgagactccgtaaaaaaaagaaaaaaaaaaaaataaaagaaactggtttcaaattggccctttggcctctggagcaaattcaaatgtaactcttccccaaccccccttctcttcttccagattaattaaaagaagaatgaactataatccttgaagataactgggcaattttttaagtcggaggctgttcttactggtgtgaggatttacacacgtcttcagtttttcagcacagaccagcagaccatcatttttagaggaaatactccctctgccctcctttttggtttccttggtggtaaagattaaatttggttgcatcattttgacttgtgtttgagtctagattttatggcacaaggaatggcataaacttttcatgtgttttggttaaaacaaaccagaccattgcattgaccctggacatctttaattgagaaattggtaactttattttaatatgtatatctgaagaattcaagaaaacaaaggcatcctcagaggtgtgcctcttttctttattattagaggcaaaacgaacaattttataggatttgtagtgaaattataccagattataaggagaaccaaaactaagtcgcaaaatttattaatttaaggggctctcgctttgaaagtttgagagtaagttacgataggcatttgtatccattcattactttcctcttttcaaataagcaactaaatagaaatgctaatctcagacttaattatttaacagaagagtgtaccatggaaaacctccagacaaatttctccttggttcagggctcaactaaaaaactgaatgggatgggagatgatggcagccccccagcgaaaaaaatgataacggacattcatgcaaatggaaaaacgataaacaaggtgccaacagttaagaaggaacacttggatgactatggagaagcaccagtggaaactgatggagagcatgttaagcgaacctgtacttctgttcctgaaactttgcatttaaatcccagtttgaaacacacattggcacaattccatttaagtagtcagagctcgctgggtggaccagcagcattttctgctcggcattcccaagaaagcatgtcgcctactgtatttctgcctcttccatcacctcaggttcttcctggcccattgctcatcccttcagatagctccacagaactcactcagactgtgttggaaggggaatctatttcttgttttcaagttggaggagaaaagagactctgtttgccccaagtcttaaattctgttctccgagaatttacactccagcaaataaatacagtgtgtgatgaactgtacatatattgttcaaggtgtacttcagaccagcttcatatcttaaaggtactgggcatacttccattcaatgccccatcctgtgggctgattacattaactgatgcacaaagattatgtaatgctttattgcggccacgaacttttcctcaaaatggtagcgtacttcctgctaaaagctcattggcccagttaaaggaaactggcagtgcctttgaagtggagcatgaatgcctaggcaaatgtcagggtttatttgcaccccagttttatgttcagcctgatgctccgtgtattcaatgtctggagtgttgtggaatgtttgcaccccagacgtttgtgatgcattctcacagatcacctgacaaaagaacttgccactggggctttgaatcagctaaatggcattgctatcttcatgtgaaccaaaaatacttaggaacacctgaagaaaagaaactgaagataattttagaagaaatgaaggagaagtttagcatgagaagtggaaagagaaatcaatccaaggcaagttttttatatcaatttttaataatggtaatggtttactttgaaatgaaaattctatgtttagtgtgtaacttaacctgtatgttgaacattgctcatgcaacaacaacaaaataccgattgatatatttgtattgcagtttttaggccataaagtgctttgcagtatgtttcctcatttgactttccaaacatcctgtgagagaagtaagactattattccgttttacagataaagtgaatgaagctcagagagataaaatgactttcccaaaattatgtagccagggagtggaggagttagggcttcttttttttttttttttgtgcttttagtagaggccaggtttcagcatgttggccaggctggtcttgaactcctgaccgcgtgatccgcccaccttggcctcccaaagggctgggattacatccttgagcccctgtgtccagccagggcttctttttcttatcctctttggcacacatcttgcttcttgaccactacatctgttgtttttctaggactcgataatttgcgctttggtgttatctccatttgcaaatggtacaatggccacaattcccgtgggctcaaaacagcatttttcagagatacacctatgatttctgatgtttctatgtttggatattcaggcttgctcaatatttgaaacaaatggaaaagacatgtatctgaagaatttgtgatttgaaaggaataacaaaaaaaatgacagctagagtaaggaaaagttattttaaactaataaaatattaatataaaaacctgccgggctcagtggctcacacctgtaatcccaacactttggggggctgaagtaggtggatcacctgaggtcaggagtttgagaccagcctggccaacatggtgaaatcccatctctactaaaaatacaaaaattagacggatgtggtgtcgcacacttgtaatcccagctactcaggagctgaggcaggagaatcgcttgaaccccggaggcggaggttgtagtgagccgagattgtgccattgcgctccagcgtaggcgtcgagggaaactccatcaaaaaacaaaacaaaacaaacaaacaacctatcaacaggtgggagcaatgaatggctcacaatcccagcactttgggaggcccaggtgggcagatcacttcaggtcaggagtttgagaccagcctggccaacatggtaaaaccccatctctactaaaaatacaaaaattagccaggcatggtggtgtgtgtttgtagtcccagctacttgggaggctgagccaggagaatcgcttgaacctgggaagcggaggttgcagtaagccgagatcacgccaccacagtccatcctgggcgtcagagtaagactccatttcaaaaaaaaaaaacacaaccacctatcagccaaggtatcataattttatttttcctgctgcattatctagtaggctaaactattattttcattccaaggttttgaatgccgaggtaatggacaagattgggattattaaatatttagtttcttgatcgggttgttttatattttttcctatttgactaaaattaatgtgtaataacagttcctaacactaagtgtttaaaatgtggcaaacattattcttgagcagttttacatatataattttatttaattcttaacaagaggttggctgtgtttcatttaggaactttgaatttttccactattagttttgattccttgaaatatccttgcccatttctattttacagaagaaatgaataaagcatattaaatgactgactgaaggtttattcacagcaaagttagagcttggactagtccttaagacttgggatcctgagctttattctggtgcctttaaggttttgagggaaatttagttaacagtgtagtttaagacattggttaagcctaatgaagataataattttagactcatttatggtagtttgctgcttgctgcttccagaagaccagcactttgaaatttcttgccagtggctgctagataagtttatattcttcaggtgtagttattaactgatttttttttttttgagacagagtttcgctcctgttgcccaggctagagctcagtggcgcgatcttggcagattgcagcctccgcctcctgggttcaagtgattctcctgcctcagcctcctgagtcactgggattacaggcatcagccaccacaccctttaatttttgttatttttagcagagactggtttcgccatgttagctaggctggtctcaaactcctgacctcgggtgatccacccgccttggcttctcaaagtgctgggattacaggtgtgagccactgctctcggcctattaactaattttaaatcaggattgacttcaagccagtgctcagtgtagaacttgcttacagttggacttgtcccgtgctgaagtttgtgctcagagattatatttcaaaatgtggaatgccccttttgatatttgtgatatcttgcccccaagctaattaggtgctgtacttttttttttgtagagacaagtcttgctctgtcgccgaggctggagtgcagtggcacgatctcggctcactgcaacctctgcctcctgggttcaagcaattctcctgcctcagtcttccgagtagctgggacttcaggcgcccaccgccatgcccagctaatttcttttgtattttagtagagagggggtttcaccatgttgcccaggctggcctcgaactcctgagctcaggcaatgcgcctgtctctgcctcccaaaatgctaggattacaggcgtgagccaccatgcccagtggtggtctactcttacatgtctgttggaggccacatttgccagatattgttgctcccgtctttttttttttttttttttttttttttttgagacagagtttcgctcttattgcccaggctggagtacaatggcgcgatctcagttcactgcaatctccacctcccagattcaagtgattctcctgtctcagcctcccaagtagccggggttacaggtgcccaccaccatgcctagcttgttttttgtatttttagtagagatgggattttacagcctagccggctggtcttaactcctgacctgaggtgatccgacctcctcgtcctctcaattgctgggattacaggcatgagccatggcgcctggcccgccccagtctaattattagtctgacataagtgtattttggataaactacttttcctaatattcttgctctgtgtttatgtgaaaaacatctgagaaccatgataaaggtttaaaaaaaaaaagatgatggattaatttacttaactgaaacaatgtgctgaggtttggttaacactgaaaccatccttcgtctgggatgtaatccctttttgtcccagaattcactgatttgaatacattttcgattttaggaaggtgtgagtttctttctgatctttttgctgtgttatattttgcagtatttgaattagtgtttgtggtgtattttgatattgcttgtaattttatgtgaatttgagaaatttaaaggaatttaagaaaatttcaaacacccatactttaagaaagattcttttctttggttcatatttaatacgtacttgagtggttgttttattatgcttaccacttcacgttttaaaaacgtactcagaacattgtgaagtacacttattttttagggtctgtgaggaaggtgaatgacaatatttccacctcttagatgagtcacatgctcctggttgtataaccagaatcaggagttgaatacagggcttctaactcgaagtttagtaatttttcactatttgcccctgaagcacatgttagtagcagaaactgaattttgagaaacattaacttttcttatcaatttaccttagtacaggttgagcatcccaaatccaaaatctgaaatgctctaaaggccaaaactttttgaatgctgacatggcactcacaggaaatgctcattggagtatttcagattttgatttttggatttgggatgctcaactgccatatcgtgcacatattccagaatctgaaaaaatcagaaattcaaaatacttttggtcccaagcatttctgataagggatattcagcctctatgatggttctcaaactctgttttaacctgcatataaatttaaatactaaggtatttaactgagaatgagatagtccttgactgaggaacagtttttattttcttctgtgagtcattgagttggttgccaaacaagccaaattgacccagagggagctcattttaaaaagtcaaactaggctttttttttttttttttttttgagatggagtttcgctcttgcgcccaggctggagtgcaatggcgcgatcttggctcactgcaacctccgcctcctggattcaagcgattctcctgcctcagcctcccaagtagctgcaattacaggcgtctgccaccatacccagctaatttttttatttttagtccagacggggtttcaccatgctggccaggctgatcttgaactcctgacctcagatgatccacctgcctcggcctcccaaagtgctgggattacaggcatgagccattgcgcctggccttttttttttttttttttaagactgtactaaatatattaacgtgttatgtaaaggacctgatgtttggtgtgaatactgacatgatttgacatgcgtatatagtttatgtaatcaaagtattgcttttggattaaaaaaagtcctgaaactcagtaagttgttcgaaatgaaacaacttaattattttacaattataaaatatgtaatatattaatacattttaatgttaataagttgtagtatcttgtaaattataaataatttgaaatgagacaacttaattaaatatagctaataactctttcttactcaagtcgccataagaaatatacttgattttaggccaggcgcggtggctcatgcctgtaatcccagcactttgggaggctgagttgggtggatcacctgaggtcaggggttcgggaccagcctggccaatatggtgaaacgccatctctactgaaaatacaaaagttagcaggggatggtgacacacgcctgtaatcccagctacttgggaggctgaggcaggcttgaacccaggaggtggaggtttcagtgagccgagttcacactgcccttcatcctgggtgacagagtgaaactctgtctcaaaacacacacacacacacacacacagacacacacacacacacacatacttgattttagatctgcctatgttgttctacagaatgttgtcaagttacttacctgatacgagctttttgtgttttttattggaataatcattattttactttaaactgtataaatacatgcaaacatcacattcctgattctttttcacatcttcagtggatattcagcaaaatcagaagtagatcaaatatatgtaaacaaaaatagaaaattaaaataaatttgatctaattctaattttgttgaatattacgtttgtatgaaaaaaagatcaacaggcaaattaatcatttgtaaataaaatttgaagagtaatgtttacttaagattattttcaaacatattggaagtggtcatttgttgtaggtgattcttcactttttttgtttgtttgtttgttttttttgagacgagagtctcgctctgttgaccaggctggagtgcagtggcgcgatgtcagctcactgcaaactccacctcccaggttcacgccattctcctgcctcagccccctgagtagctgggactacaggtacccatcaccacgcctggctaattttttctatttttttagtagagacggggtttcaccgtgttagccaggatggtctcgatctcctgacgtcgtcatcctcccaaagtgctaggattacaggcgtgagccactgcgcctggccgattcttccctattgtagcatgtggctgacagtctccactttactaagttaagaactatatataccctttttttttttttttaaattgagatggagtttcgcccttgttgcccaggctggagtgcaatggcgcaatcttggctcactgcaacttccgcctcccaggttcaagcaattctcctgcctcagtgtccctagtagctgggattacaggtgcctgccaccacacccagctaattttttgtatttttagtagagatgggggtttcactatgttggccaggctggtctcgaactcctgatctcaggcaatccaccagcctcagtctcccaaagtgctgggattacaggcgtgagccaccgtgcctggctaaaatttaaacttttaacatttagactggactactcttaggtaagtaaaatattttagtttttaatctacttaggggggaaaaatctctatagattacttatgatacaaacagatgacctaaagatagcaacttaaaaaattttttttccctgaaagcgtattagccgtttgagagtttaattttgcattttcgtttcacttcttcatttctgtagagatcattggagtaataatagtacaaaatatttctcccctcttgcaagcttttaattatacttgtattaggcagcgtatttgtcagtataaacctaattgagataaggaacagtagaatgggcaactacaaagagttgtgttgggacagaatgtgatctagtaataattgtggtggatttgatggtgatttgctaccccagtgatacagattatattttgcaattagcaaaatttttgatcaagtggggataagttgagagtcagatgaagtatttgtgctcatatgagggaccattatgaatacttttgtctaactttctaaaattagtaactgttcccactagtttacagagtattttttctatttttttggaaccgagttcaaagcctggcatgtcaaaggcactcaattaaatttttctttttttaactgaatagatttttgaaaaataacactaaactatattttagaatatttggattttcttttaaagatggcttaacctttaaacagatacaatttgcacataaactgttaatataattcatcaaacaagagaatgagcattttggaagttaagagcctttactgcagaaatgtaggatggtatttcaaactactattgaaatattatgtatttgaggagtcctcctttcctcattttcttatctagaattatatttctgagacaaacaagataactgaatgttgggttcaaatgtatctcatttatagttttttttacacagtaattacagtagttggatatttgcttactaaaatgaagtgtgcaagaagaaagtgtgaaacagtttttttattatagaagcattttctgaattatttcattattttcgacttgttacccaaaaagatacattgattggagatagtgcccattccatttattcggttgataccacattggggttttgaatgatggagaccaatacagacctgcttagattggataaggttttgtttagtgcctttctcattttttacaaaacgacttttataataacttcagagtaatcaagtttttggagctcattctgttaataacaggatatgtggaccctccctatccctggcattttttttttttttttttttttttgaaatctgtagagtggctttgcaaatagtgccccctgtggtttaggaaatagagcctctttatttttattattaaaaaatagaattgttagcatatgatttttgaaagttagaaatttatcctttttgtttgagaaatgggaaaaaacttagaaactttaaagaagaaaaacaaaaaagagatggccgtgttttcagagtaggcctggatcatcatagtcagccagtagttttctcgtagcagtgcatatgttatcaattatgccactgggaaaccaaagaagtaatcaagaattgggctaattttttttttgataaggagttttgctcttgtagctcaggctggagtgcaataaggcaatctcggctcactgcaacctccgcctcctgggttcaagtgattctcatgcctcagcctccctagtagctggaattacagtcatgtgccaccatagctggctaatttttgtattttttgtagagatgtggtttcaccatattggtcaggctgatctcgaactccgtacctcaggtgatctgcctgtctcagcctcccaaagtgctgggattacaggcgtgagccaccgcacccagcgaattgggctaattttaatccctttagaattctgggagtggaaagtgattgtcgagctagaattcagtttgttcctagtaaaggggtagaacttgtttgagaatagctttggtaatagcttgaatctgtattttgttcacatatagaattttattctactgggattcatattacataaaataaggattttattagactctagaaagcaaaagaatatataaacaatgcatcttgttgtaagatgtgatttgcttccggctgcgcgcggtggctcacgcctgtagtcccagcacttttgggaggctgagacgggcggatcatgaggtcaggagatcgagaccatcctggctaacatggtgaaaccccgtctctactaaaaatacaaaaaattagccgggcgcggtggcaggcgcctgtagtcccagctactcgggaggctgaggcaggagaatggcgtaaacccgggaggcggagcttgcagtgagccgagatcgcgccactgcactccagcctgggagacagagtgagactccgtctcaaaaaaataaaataaaataaaatgtggtttgcttcaatcactaactcattatattaggcagaaagaatgaataggaaagatataaaattagtttgagtccttttgatttcatgacttctagacttaagagtggatcatagaaatatgtaatatttctatatatacatatatatgtatatatacagagagagagagagagagccccccccccccccccgagcaggagttcatcttatagtcttacagtcttcttatatcttacagtcttcgaatctagaatgtggtagatgcctaataaaggtttggataacagtgaagtctaagtggccctataaagttaccagtgattctcgaagagggaaacaggtttagttttaaaacaaaccagcatttcgtttttatttgtgatgttgaatttattctgagatttcaaatggcattaaaagtacatattttgcattttttatgggaacaaggaattaaaaagcttaagaaacttactaaaagtttgggtaacatagtttgaccctgtctttacaaaagattgaaaaaaacaattagctgggcttggtggggcatgcctgtagtcccaactacttgtggggctgagatgggagtatcgcttgagttggggaggttgagaccgcagtgagctgtgatggcacctctgcactccaagcttgggcaacagagcaagaccctgtttttctcaaaaaaaacaagacaaaacaaaacttaataaaaatgatttaagacttctatgctttttatagtctatgttaaatttttttgtgtgattatgaaaacaatataggcccattgtagtaaatactaaaaaagtacaaagaagaaaacacaatttcctcataattgcaccatgtgataactgcctctggaatttattcatttgcgtatgtaattgtaactgtgtttgtgcaaaagcatttctagagtgcataagtattaataaaggagtagtaggcctggtgcggtggctaacgcctgtaatcccagcactttgggaggccaaggcagacagatgatttgaggtcaggagttcgagaccagcctggccaacatggtgaaaccccatctctactaaaaataataataaaaaaaatagctgggcatggtggcacacgcctgtaattagagctacttgggaggctgaggcaggagaattgcttgaatccaggaatcggaggttgcaatgagcggagatcgtgctactgcactccagcctgggcaacagagtgagactctgtctcaaaaaaagaaaaagaaaaacaaaaggagtagttactggaataatacttttggaccaattttaagacagttcatttagagcagtgtttttctaactgcaatttgtcattcatgtagccatctcaagcagggttccataaggggagatttaagcactacagaaaatgaattgagtgctggttttgtcatttctcccagtgatcgtactggtaccattctaaatgcactggagagaaggtaattcattacatacaatggatgccttggggcattttaaattctcctgagaacctcaattgaaaaccgccaggagggtcatgaaatcaatttagtgggtcaccagcattaaaaaacataaaaacctgaagtagaataaaatggaaaatagaggacattgcacataggaagattaatcaatctctgttttgaaattgccagtttacattatttgaaggccagaataatccaggactgtaaattgttaagcatatatgctaaaatgagatagaaaagtaaagccttagaattatacagattaaaatttttgacaaatagtggaaaataatgtgtatgacactgagatttccatgtagttgcagtattaagtttattgggcatcacagaccttcagtataaaatgtcacaggattaacaggatttttatcagtgtatttttcttcaagttctaaaggggatgttatattaccaactttacatggctttgtttccattaaggactcaaaataatagttgcaaaatattacaagaactcgagcctttgcattttctgtgagcatttttaagtatctcaaacctaaaattggctttgtgaggtaggtggtatgatctttcagcctgtggaaacagctgccattgctgtgactcctgacgatctgtttttgatcagttagtgcagatgcttagatcatactgtcccagttttgcattaatttgatcaattctattgattacagagaagtgaggcccaagactaagccttgaaatctctaagtagctatttgctaccttgtaacactgttctgtttcatttattgaaacactaactcacaacatgttggaaatattaaggaaacctgatagtgtactgagggattctgtttcttttggtaagagttgttggcagctatctggtagggtgtctttatacttctgaaatcatttattgaccacttgaatgtcttagtattatacacagcaaaaagaccctgatgagatatattcacttcctgtgtatccagtcatatgtttagtaaggttgctaatgatttattttgggtcagaacaaagtaatgtgcatttcatatgcattatattttatttcttgtgtaaataggccattagggagatagactattaaatttaccaacctacactactgcttctgtcttatgaacacaaatttaaaaattaatctttatcacttatagcactttaaaaattctgtttttagaaataattttcaatttttttttttttttttgagacggagtctcactctgtcgcccaggctggagttcagtggcgtgatctcggctcacagcaacctcgacaacctccacatcccaggttcaagcgattctcttgttgcagccccctcggtagctgggactacaggcgtgcaccaccaggcccggctaatttttttatttatttttattttttagatagtcttgctatgtcgcccaggctggagtacagtggtgtgatctcggctcactacaccctccacctcctgggttcaagcgattcttctgcctcagcctcctaagtagctgggattacaggcatgagccaccgtgcccagcctttatgcctggctaattttatatttttagtagagacagggtttcaccatgttggccgggctggtcttgaactcctgacctcaggtgatcctccgccttggcctcccaaagtgctgggattacaggtgtgagtcactgtgcctggccttccggctcatatatttgtaaaaaggcttaattctgatttttgttggaattttggaattcccactagtgttttgaggcattatcttggtttctttagttcattaatgtttgtcattaggacttaattaaagatcaaaatagtaatctgatgctgtaattaaaaattagagtgccacctaaaagcaagatttagtatttgaaaataagttccagcttgggcaacatagtgcaacccctgtctctacaaaaaaaattaaaaaaaaattagtcaggcttggtggcatgggccaatagtcctgactactctggaggctgaggcacgaggatcccttgagcccaggagttggaggatgcagtgagctataattataccactgttccccagagcaagaccctgtctcaagggaaaaaaaaaatgtctaagaattttaaagggttttttttggtacaaattcgaatacttgtatgaataatgctgagcaggtggaatagcttttgtatttagaaaggagtgacaagaagttttttgtaaatgaaatcaagctctctaaattatttttcattatgagactgattagcatcgtatcactaaaatagagtggttcttcattaggaaatctgattatcaaagggtcacgtatacagaataagcataggaaggtgcagaaatttagagaaactttcataaaatgtttcttagtttttacttattttatatttttttactgtatattttggaattgtttaaattgtacattcatagacatttggagttttatgacctaagaggaaagaacctttggaatgaaatttttgtgtctgaaattttgcttatgtgtttgaaatgaggatgctatctgttcattttggggtaaataatgatggggaaattgggtgataagagcattttgaaatgttaaggctctaacttaagctactaaatgatccacttctttggcaagttatataatgtattgtattttaaaatttaaatacacataaaaataaatgattcctatgttgaaaggtaagataccaggcagtagatactcataatttggtatctaatttttattcctgattagtagcattactgctgaaccatttaattatattgttctttttttgaaaacctaatttgtatgttgacacaaatgcagaatagatgagaaaatctggcatgcctctgaatgttttgttgtatcataaacattgtgcttttcttaattgtttttaacatacagttaggataatttgttataaatgtgtttatggcttaccacagcatattaggtaaaattagcttgcaacattttatcatggttagtgttgtgcgtgtccccatcatttgtattgtttaatttatatctctgaaaaatgcagccttagaaactgttgggcttccttggtgcttcatggagtagagggatatcaaacgtgaaagagaccaagagttttgtggtagcagaataaccttgtaaaaggctaccttgggaattaatgagctgcactgtcattcagaattcattcaacaaataatagatatttgatagatgagtccctactacatgctaggcatatagtgctaggtattaaaaatacaaaggtaaggctggttcttgacctcaagctgctgtttaagcagaggctgcgtagccacttaacagggattttaaatagggaattcagacattggctaggggactatgctaggtgatctttaagattccttagaagctctagtctgactcttactgggttggtcaagactaggaaataaaataaagaataggagctaagagggatgactgtttaaaaataaaggaatgtgctagcagttatttaaggtggcacctgaagtttagagacacagaaataaatagatgctaggtttggctcatgagtaaagataaaacttactcttataaatcaaactgtagggttttgaaatgaacttgatcaaaattgagtcagatttcaagtcaaggtctttgagcaaatttagaatttgcttgatattctgaagatttgagattccagtattcattataggaaaaactttgaaatatataaatcaattttagtaattttatatttttttctttttcttttttcgagacaagccccacactgttgcctaggctgcagtgcagtggcaggatcatagctcacagcaacctcaaacctgccagcttcaactgattctcccacctcagtcccctgagtagctgagactacaggcatgcgtcaccacggctggccaattaaaaacaattttttttgtagagatgggggtctctctatgttgtccaggctggtttcgaactgctggactcaagcagtccttgtgccttggcctcctaaaattccggggctataggtgtgagccactgggtagggccaattttagtagttttaatttaaaaaatctggaaacaattgatttcttgggcagtacatctagaattctttcagatataacacttatttaaagaggagctttctttgttttttaacaaatgatgtctagaaaagaaattctcatttaattcaagctgattttcctttttttttttttttttttttttgagacggagtttcactgtcttgcccaggctggagcgcagtggcgcaatctcagctcactgcaacctccacctcctgggttcaagtgattctcctgcctcagcctcccgagtagctgggattacagggatgcaccaccatgcccagctaattttttttttcttattagagatggggtttcaccatttggtcaggctggtttcgaactccggacctcaaatgatccacccacctcggcctcccagagtgctgggattacaggtgtgagccactgttcctgccctcaaactgatcttaaattttactgatttgttagaatgaacttatcctcgttcattgacacctctttggtcatgtagagctggggtgcaaaatgttctacccgttaagctactttttaaaagcattgtgtttttttaaaaaactgttttcatgaattgtaaaatgtctgaaaaagttttgaatctaagtggtatacagaacataatttagctatgtcacgttgactcaagagtttttatttttttaacgagacagggtctggctctgtcacccaggctggagtgccatggagcaatctcagctcactgcaacctctgtttcctgggctcaagtgatcctcctgccttagcctcccaagtagctgggactacaggcacacatcaccttgcctggctaatttttgtattattattagagatggggttttgccttgttgcccaggccagtctcaaactcctgagctgaagcagtctgcccactttggcctcccaaagtgctaggtaatatcacagatgtgagccgttgcgcctggccaactcaagattcttaaacattaattaccatactttgttgaattggggtaggggacaattgagatatattaaattatttgccccggtctatgctaaagcctttactcagattgtcttgctttttgaagcagtttttgtgtttgcatcttgtaattttcctctctccttaggctgtcagctgtcacttagcatctatcatttagtatttctgttgccagaagtcagttccctttcttactgctataactaagctataggctgaggaactatgtaaataagtgatcagtttgttttataaataagcagtggaatttgcccagattctgaatattagttcaaaatgtgatgtttcgttttctgttttcctttttttttttgagatggagttgcactttgttgcccaggctggagtgcagtggagcgatctcagctcactgcaacctctgttcccctgtttcggttgattctcctgtcctcctaaagtgctgggattataggcatgagccactgtgcccaggcctttttttttttttttaattccacatttacatatcatgtagagaccttcactgaatattcaactcttaaatcttttaaaaatattaatttttttcttataattttgaggtcttattagtatttcaaattcattgctcaataattcttttttttttttttttttttttttgagacagagtctcactctgtcacccaggctggagtgcagtggcacgatctcggctcactgcaacctccgccctctgagttcaagcgattctcctgcctcagcctcctgagtagctgggattacaggcgcctgctgccgcacccgactaattttttttttttgtatttttagtagagacggggtttcaccatcttggccaggctggtcttgaactcctgatctcgtgatccacccgccttggcctcccaaagtgctgggattacaggtgtgagccactgtgcctggcctaattcttaacaaaaataaagatctcccacatacatatttttttctttttttatttttgagacagagtcttgctctgtcacccaggctggagtgcaatggcgccgtctcggctcactgcaatctccacctcccaggttcaagcgattctcctgcctcagcctcctgagtagctaggattacaggtgcgtaccaccacacctggctaatttttgtatttttagtaagacagggtttcactatattggccaggctggccttgaactcctgacctcgtgatttgcctgccttggcctcccaaagtgctgggattacaggcgtgagccactgtgccctgcctatttttgtcctttagttggccctaagtcatctcctgactgatcagattttaagatacatattctaagagcggtttcctttctgttttcagcctgttttgttgagggcagtgggttacttgtcagatctctcccaggtttcttcattctcattgatttcctccattagtaggatctcagtaatcaaaccagagtttggatagtttagagttgattttgttttaatcactactgcttaacatccagagatctgtttgcagtccttagtttcttggttccaaactggaatattgggacatcaggcaaaacagctttgctactttcctaatttgttgaattgggaattggactctctctctctctctttttttttttttttggagacaaagtcttgctctgtcacccaggttggagtgcagtggcgcgaactcagctcactgcaacctctgcctcccggattcaagtgattctcctgcctcggccacccaagtaggtgggattacaggcactcaccaccatgtccagctaatttttgtagaaacggcgtttctccatgttggccaggctggtctcaaactcctgacttcaggtgatccacctccctcagcctcccaaagttacaggcatgagctgctgcacccgaccagaattggagcttcttttatttatttatttatttatttatttatttattttttttatcttgagatggattctggctcagttgcccaggctggagtgcggtggtgcaatctcggcttactgcagcctccgcctcctgggttcaagtgagtctcctgcctcagcctcccgagtagctgggattacaagtgcgtaccaccatgcccagctaatttttgtatttttagtagagactgggtttcgctgtgttggccaggctggtcttgctcctgacctcaggtgatccacccttctcgtaccaccacgcccagctaatttttgtatttttagtagagactgggtttcgctatgttggccaggctggtcttgctcctgacctcaggtgatccacccttctcggcctcccaaaatgctaggattacaggcatgagccactgcgcctggccatggaacctcttaaaggtagggtttagagaaatatccagctctcttttttgttttttcccttgtttaactcgttcctaatcgcattctccctcagtttcctgggtttgtctgttaacttcctatttttgttggtcaccttaaccatgccacatttcagctctcctttccttctttcccctttcccttaccagtgagtcttgcccccccttttaagtatccttttcccacaaaagcaaggtaatttcgtataataggaaatatgtaggggatgaagggaggacaaagtgtaaataaagtaaaccaaaataagggagaagttagtaaccacagatcatttattctttttttctcttcaatttctttttttgttttgttttgttttttgagacgattcttgctctgttgcccaggctggagtgcagtggcatgatcttggctcactgcaccctccatctcctgggttcaagtgattctcctgtctcagcctcccgagtagctgggattacaggagcgcaccaccatgcctcgttaagttttgcgtttttaatagagatggggttttgccacgttggccatgctggtctcgaactcctgacctcaggtgatccacccacctcggcctcccacagtgctggaattacaggtgtgagccactgaaccgagcccctcttcaatttctgaacgtcagttgttttctcatctgtaaaatggtaatgatacctatttaatgggggatatttgttagaattaagaatgatgtataaagttctcagcccgtagatgttcattaagttaccagttacctttctccttatttttctttatttttagttatagctcatctttaagtattaaaaaatcctttttatatttattaggaaatatagtttaatgacaagtgttagcaaactatgtggttttggatttaatttggcaaagtattgctgtagaatggtatctagctaatatgctaacaaatactgtagggatagggtatagtctagccgattgtagtacaggaataagaatcaattttccagtgctatacctttatagagttctattatttaaaatggatttctggccaggctcagtggctcatgcctgtaatccctgcactttgggaggctgaggagcagggatcacctgaggtcaggagtttgagatcagcctggccaacatggcaaaacccaatctctactaagaatacaaaaaattagctgggtgtggtggtgggtgcctgtaatcccagctactcaggatactgaagcagagaatcgcttgaacccgggaggtggaggttgcagtgagccaagatcgcgccactgcactccagcctgggtgacagagcgagactccatctcaaaaaaaaaaaaaaaataaataaataaaatagatttcgtaagtatgaaatttgatgcagtcatttctggtactccatgttagcatgcatactgaaactgttcttgtgatgggatagttcatgtgggtgtctctgagtttcaggtgataatcaggcttcttcaagggaagactgccttattggaagatgactcttgagacagggtctcactcttgcccaggatagagtgcagtggtgcaatcatggttcaatcatggttcactgcaagcctcaacttcctgggctcaagggattctcccacctcagtctcccaagtagctgggaccacagatgtacaccactgcaactggctaatttttttttttttttttttaaagagactgggtcttcctatgttgcccaggctgactccacggcttaaggaatcttccccactctgcctcccaaagtgctgggaatacaggtgtgaaccactgtgcgtggcatgatgactcttaaataatgttagttgtctttacccagtggcccagtcaggttgacacataaaattaaccttcacagttttacttcaataaatgtttcccttccatgtttttctgcagacagatgcaccatcaggaatggaattacagtcatggtatcctgttataaagcaggaaggtgaccatgtttctcagacacattcatttttacaccccaggtgagttggtatttatttgttcgtttgttcattcatttcttcattcaacaactatatgccatgcactattctaggacatgggaatttaattatttatttattttttttggtggcagagtcttgctctgttacccaggctggagtgcagtggcgcgatctcgtctcattgcaacctccgcctcacgggttcaagcgattctcctgcctcagcctcccgagtagcggggactacaggctcacaccaccacgccctcctaatttttttagttttagtatagatggggtttcacagtgttggccaggctggtctcgaactcctgacctcaagtgatctgcctgcctcagcctcccaaagtgctgggattacaggtgtgagccactgtgcctgaccacgaatttatttctttattttcaggctttcttgttaatcatagattatctttgaaaattcaaaattaggctgggcgcggtggctcatgcctgtaatcccagcactttgggaggccgaggtgggtggatcatgaggtcaggagatcgagaccatcctggctaacacagtgaaaccctgtctctactaaaaatgcaaaaaaattagccgggcctggtggcgggcacctgtagtcccagctactcgggaggctgaggcaggagaattgcttgaacctgggaggcagagcttgcagtgagccgagatcgcgtcattgcactccagcctaggcgacagagcaaaactgtctcaaaaaaaaagaaaaaaagaaaattcaaaattatttttaaataagtacattggtatttaatgtattttttgtttctatttatcattatagggaaatggtaggtgaattgtattgttactcttattagaaaaaatttcaaagaaagaatctgaaatgaaatgaattgtaaattgcactgaatatttgaaataacctttactatgtgtttctatgtgttttctagaaataggtcattttctttttgccctcaagtaaaaaatggaagttctcctttaatttcttacttttcttcaagaggtaaacaaactcttcaagaatttggtgtgcaactttgatttttttttttttttttttgagacaaagtctcactgtgttacccagactggagtgcagtggcaggatcttggctcactgcaacctctgcctcccaggttcaagcagttctcttgtcatggcatcctgtagctgagcctgagcgccagctgtcactcctggctaatttttttgtatttttagtagagatggggtttcaccatgttggccaggctggttttgaacctcaggtgatctgccagccttggcctcccaaagtgctgctaggattacaggtgtgagccaccgccccgagccgcaacttcaattttttttttttttttttgagatggagtctcgctctgttgcccaggctggagtgcaatggtatgatctcggctcactgcaacctccgcctcccgggttcaagcatttctcctgcctcagcctcctgagtagctgggattacaggcatccgctgctacgcccagctaatttttgtatttttagaagagacgaggtttcaccatgttggccaggctggtctcgaactcctgacctcaagtgacccacctgccatcagcctcccaaagtgctgggattacaggtatgagtcactgcacccggcctgcaactttgatattttaaaaagaaattcttttgaaactaagagctttcttaataaccgtacttctcaaaatcagagttttactgtttcaataaatgttcaccctagattgtaagttttttgttgttgagccctagatttttttctactagtgtaaatctgtattccctccaagtatggtgataaggggactgagtcttatttacatttgtacaatcactactttacctgttgtatttgcagtaagtcttttgagccctattaaacctgtcaattttcttgtcctgtcagaaaactgagattttggctcaaaaatggatgttattaacaaaggggaacaatatagatgtcttagtacaaagaaaatgaaatgtaagaggagattgtctggagttcaggggatagagtgtcaagtcttaaatggttacatctttttgctaagtgttactcagaatatagttacaaatatggtacttaaatatctagctgaaatttgtttgtcccatgagcttctcacatgagtctactgggcaattttatgtgagttttggtcaaaattggtaatctcttttatcttagttttgcataatttattgttgccattttatcaaatgagtaggaagtagtgaagtatttcaagaagattgctcagtggggtttgatacaagaactgcccagtagctgggcgacattcagagctctctctctgaggtatataagaagagccctgggagctcctcactgagcctcctgtgagtcaggacatagccttgcagtctgccactgaagcagcctcaccaaagcaaagattccctgctttggaagggtggtgggcaagataaagtcctccaaagtagttatagattattctttttctggagtaaaacttacctgctcagagttgttacacagctgtataaagtccttaatgcttttaattctcaggtggttttgagggaaggagaagagcctgtgattttccttctgtgtatctttttagtgcttagaaattacttgccaaaaaaaaaaaaaaacacgaaattacttgcaagctggttatggttgcttatgcctgtaatcctagtgctttgggagttggaggtgggagggtatcacttgagcccaggagttcaagaccaacttggcagcatagcaagaccctatctctaaaaaaaaatgggtatgtgtggtcccagctacctgggatgctgaggcaggaagattgcttgaacccaggagttagaggttacagtgagccatgatcataccactacgctccagcctgggttacttgcaaactaacaaaaaatcccttataattttgtttgtaatgcctaaagtgttgatttttttcctaagaattctttactgtgacctttattttctgagttgtaatattgtctgttttggttagaaaaaaaaaagtttaaccacagaaatgcatgttacatatttgatttttacttaattgtaatatgtaatatatgtcttgttttgcttttacttgttttcagctactacttatacatgtgtgataaagtggttgccccaaatgtgtcacttacttctgctgtatcccagtctaaagagctcacaaagacagaggcaagtaagtccatatcaagacagtcagagaaggctcacagtagtggtaaacttcaaaaaacagtgtcttatccagatgtctcacttgaggaacaggagaaaatggatttaaaaacaagtagagaattatgtagccgtttaggtaagtattcagagattatctttctaaaattaaatatctaatgaacacatttattgagcattttcaaacaggctttttgtttgagctaaattttcagataattggagcttttacctttaaaaatgctacccttcaaaactctgggtgatttattttaatctcagttgctatacttttctagcgtggtgatagctcaggagactgagatagatacaggctacctggcctcagactgcaagttatttttgtccgaatttttttcctttcctaccttttatttgctgtcagtcttcaggagatccttgtttttctttcctcctttttttttctttttttgtgacagagtctttatcgcctaggctgaagtgcagtggtgagattgcggtcactgcagcctcaacctttgggctcaagtgatcctcccacctcaccctccctagtagctgggaccagaggcgcacaccactgtgcctggctaattaaaaaaaaaaatttttttttttttttttgtagagatggtcttggtatgttgctcaagctggtctcgaactcctgggctcaagtgatcctcctgccttggcctctcaaagtgttgggattacagttgtgagccaccgcacccaacctttatttttctttctgatttgccatgaactgagacaccatttaataataagaagtattatgtaagtaagagtagttaggtatagaactcaaggaagcttagttatggaataaagcaaggattgaaagctctgggggccaggcatatagcataaatgtggaatattgactggtcatttaaaagaaaaatagctggttacttaccgtgccttttaaaatactgtggattaaatgagacatgtctgcagatattgcctgtgttaccatccatatagcagcacagctttgcttagtgattaggcagtgtgacagttactttagctgcattggaacagttggagggtcctctatttatttaagtttttatagagaattgagattcttgggggttttcttttctttctttctttcttttttttcttttttttttttgaggagtttcactcttgttgcccaggctggagtaaaatggtgagatctcagctcaccgcaacctccacctcccagattctcctgcctcagcctcctgagtagctgagattacaggcatgcaccaccacaccccgctaattttgtatttttagtagagacgggttttctccatgttggtcaggctggtcttgaactcctgacctcaggtgatccgcctgcctcggcctcccaaccaaagtgctgggattccaggcgtgagccaccacgcctggctgattcttgggtgggggttttctggtttttttgtttgtttgtttgtttgtttggagacagagtttcgtatttgttgcccaggctagagtgcaacggtgtgatctcggctcactgcaatctccgcctcccaggttcaagtgattctcctgcctcagcctcctgagcagctgggattataggcatgcaccaccacgcccggctaattttgtatttttagtagacacggggtttttccatgttggtcagtctggtctcgaactcctgacctcaggtgatccgcctgcctcggcctcccaaagtgctgggattacaggcgtgagccatcgcgcccggccaggggttttctatacatttattttgagggttttttgtttcgtttttcttttttagagacagagtctcactctgttgctctaggctggtggagtacagtgatgcattcatagctcaccgcagcttcaaattgctgggctcatagtccttgcacctcagcctccctagtagctaggactacaggcatgtgccactgcgcctgcctcattttttcattttttttgtagagacagggtctcactgtattgcccaggctggcattaagctcttagcctcaagtgatcctcctgccttggcctcctaaagcattgggattacagatgtgagccaccatgcctggccaattttgagatttttaaaactcagttttcttcagatttaaatatggtaaacaaaaattagtaatgactattatgccatatttacattgtattttatttcttaaattaattctaatgacttctaaaaaattattgagataatttatataccataaaatttacccttttaaagcctacaattcagtggtttttaatacattcacaaagttgtgcaaccatcacagctaatttagttccataatgttttcttttctttctttttttttaagatggagtttcactcttgtcgcccaggctagagtgcagtggggtgatttcggctcactgcaagctctgcctcccgggttcaagcgattctcctgcctcagcctcctgagtagctgggattacaggcgtgtgtcaccacgcctggctaatttttttgtattattagtaagagacagggttttcgccatgttagtcaggctgatcttgaactcctgaccttaggtgatccacccgcctcggcccataatgttttcatcactccaaaaattaaccctataatccattaggagtcactccctgattctccctttctcgaagcctctggcaaccactaatctattttctatctttatggatttgcttattctggacatttcatataaaaggaattgtacaatatgtggcttttcatgtctggtcaagaagcttatgcttctttcatgaaagataatgttttcacagtccatgttgttgcatgtaccagtacttctttttatggcctgataagattccattatgtgaatataccacattttttttattccttcgtcagtcggacatttgcattgggtctactttttggcaattaagaataatgctgctataggccgggcgcggtggctcacgcctgtaatcccagcactttgggaggccgaggcgggcggatcacgaggtcaggagatcgagaccatcccggctaaaacggtgaaaccccgtctctactaaaaaaaaaaaaaaatacaaaaaaattagccgggcgtagtggcgggcgcctgtagtcccagctacttgggaggctgaggcaggagaatggcgtgaacccgggaggcggagcttgcagtgagccgagatcccgccactgcactccagcctgggcgacagagcgagactccgtctcaaaaaaaaaaaaaaaaaaaaaaaagaataatgctgctataaatacttgtgtagaagtttaagtgtagaactatattttcagtttttttttggtatgtatttaggagtgaaattgctaggtcatgtggtaattatgtttaatgttttgaggaactgccaaacttttcaaaagcagttgcaccattttacattcctgtggtagcttgggagtttcaaattttgcatatctttgtcaacacttgttattgtttgtcttttgaatatagccatcctagtggttgtgaagtggtatttcatggttttaatttgcaatttctcagtgaatgatgatattgagtatcttttcatgtttttcttggacattgcatatctttggagaaatgtctattcaggtcttttggctattttaatgctaggttgttttactattgagttgtaagagttctttatatattctggatactggatccttatcagatatttgatttaccatactgttttctttttactttcttgttagtgttcttttttttttcctgagacaaagtctggctgtatcaccccagcttggctcactgcaacctctacctcctgggcttaatccatcctttcacctcagcctcccaagtagctgggactacagggatgtaccaccatgctcggctaatttttgtatttttggtggagttggggttttgccatgttgaggctggtctcaaactcgtgagcttaagcaatccacctgcctcagcctcccaaagtgttgggattactggtgtgagccaccgcgcttggccgtgttagtgttctttgaagcacaaaagttttaaatgtttattacatccaatttatctatttttttcttgttttaggtatcatatctaagaaactattgcctaatcccaattccaagaaatatttatttatgtatttatttatttatttatttatttttgagacagagtctcactctgttgcccaggctggagtacagtggtgccatctcagctcactgcaacctccacctcccgggttcaaccaatttttctgtctcagcctcctgagtagctgggattacaggtgcgcgccaccatgcctggctaattttttttgtatttttagtagagacagagttttaccatgttggtcaggctggtggtgaactcctgacctcaggtaatccacctgcctcggcctcccaaagtgctgggattataggcgtgagccaccacatccagccaagaaatttatgtttaagggttgtagctcttacatttaggtctttgatcagtttagagttaatttttgtatacagcataaggtccaaccttattcttttgcatgtggatatagttgtccgtatgttgaaaagattattctttcctttttttttttttttgagacggagtcttgctctgttgcccaggctggagtgcagtggcgctatctcggctcactgcaagctccgcctcccaggttcacgccattcttctgcctcagcctcccgagtagctgggactacaggcgcccgccaccaagcctggcaaattttttgtattttttagtagagacagggtttcaccatgttagccaggatggtctcaatctcctgacgtcgtgatccgcccttctcggcctcccaaagtgctgggattacaggcgtgagccaccgcgcctggccagaaaagattattctttcctgactgaattgctttggcacctttgtcaacaacaattgccttataaagtatgagttttttaaatttctggactctgaattctgttctactgatctgtatgtctatctttaaatcatgtcacacagtcttgatttctgtagctttgtagtaagctttgaaattgggaattgtgagtctttcaacttcgttattctttttcaagattattttgcctattttgggtttgttgcatttccatatggattttagaaactgcttttcaatttctgcaaaaaatccagtggggattttgatagggattgcactgataagtagatcaatttggagactattactgtcttaacaatattaagtcttccaatccatgaatttgggatgtctttccatgtatttaggtcttaaatttcttttagtgatgttttgtagttttcattgtacttgcactgcttttgttaaatttattcctattttatttgttttggtctaatttataaatgaaatgttttaaaaattacatttatggattgttctagtgatttttttaatggagtgatattcatactttgttacttgatttttttctctccaagatgcatcaatctcaaataattctacaagtaaaaggaaatctgagtctgccacttgcaacttagtcagagacataaacaaagtgggaattggccttgttgctgccgcttcatctccgcttcttgtgaaagatgtcatttgtgaggatgataagggaaaaatcatggaagaagtaatgagaacttatttaaaacaacaggaaaaactaaacttgattttgcaaaagaagcaacaacttcagatggtaaaattgttatctaaatgatagtccattatgaaaagatacttttgtatattgctctgtcgcccaggctggagtgcagtggcgcagtctcagctcactgaaacctccacctcacaggttcaagcaattcttctgccttagccttccgagtagctagcattacaggcacgtgccaccatgcctggctaaattttgtattcttagtagagatggggtttctccatgctggccaggctcgaacttttgaccttgtgatccaccagccttggcctcccaaagtgctgggattacaggtgtgagccactgcgcccagcccccctgtatattcttagtaagaaaagtcaaaacgagatgctacaaatgtacttaagattattgttttacactgaaaagcaattttaatatattttaaaattttttgagaaaatagttttttaaaataattacctctatatagaactgataatgatagctgaattttaggtattttctgtgctatgttttccagaactgaaaattttaacatggtgaaaataaagtaaaacttgtattgtgattctttacattacaggaagtaaaaatgttgagtagttcaaaatctatgaaggaactcactgaagaacagcagaatttacagaaagagcttgaatctttgcagaatgaacatgctcaaagaatggaagaattttatgttgaacagaaagacttagagaaaaaattggagcagataatgaagcaaaaatgtacctgtgactcaaatttagaaaaagacaaagaggctgaatatgcaggacaggtaagaattactgtttgtataatggtgccctttcagcatggaaatggaaactgttacttctctcttttttttttttgagacagagactgctctgtcgcccaggctggagtgcagtggcacaatctcagctccccacaacctctgcctcccgggttcaagcaattttcctgcctcagcctcctgattgtagctgggattacaggcgtgcgacactatgcccagctaaattttgtattttttagtagagacggggtttcaccatgttggtcagtctggtcttgaactcctgacctcatgatctgcccacctcagcctcccaaaatgctgggattacaagcatgagccactgcacccggccaccgttacttctctaataaaggaattactttttgtcaagctcagtttactaagctagatttcaaaatagataattctgttaaacatagctttatgctgtattgtccaagatgattattttgatgtttgttgcttttattagtttaaatttttatcgggttactgcagtttagttacctaaattgctaatctctagccctctgaatattatatgttatattattttaatgtagtatatgagctttcaaatctacaaattaacaaacaggaactgttgcctgttatgttcaaaagcactggagcaaaaataagcaattctcttttgttaatagaatctcacaatttaaggaacatgaacaaataactaacatgagcaggctgtgatgagcggtatagtaaagtatagggcataatgaacatgaacatgctggatgtgttccttcctcttgttcctttgctttttcttaaatttagtgtcctgtcagatgtcagattaatagtattagatgcttaatggatttagtatacatgaaatagttcgttttgtaaaaagtaatttgaaaatagatattttctatgatatgaggattaaatggaaaaacaaaacaattaaaattgatagcgccttttaaatcacatagttggcagaactgaggcagagattggaccatgctgaggccgataggcaagaactccaagatgaactcagacaggaacgggaagcaagacagaagttagagatgatgataaaagagctaaagctgcaaattctgaaatcatcaaagactgctaaagaatagaaactgttaaagagattcatctgtgtattactgacaaggttttttttgtttgttgcttgctttggtaattgaattctgaagaatttatctgcatgacgataactaggcattctatccatttgtagatcagagaaagtgaagagattatatattagtacttaaatttttacattttccaaatgaatgaaaatgtatgtttctttgtacttttttaaaaaaatcagcttagtaacaatactatatggtttcaactagtaggtaatctgcttatatttctaatgcaaacttaacaattgtgtactttttaaaagctgcaatatgtgttggaaaatagctgtggtcaattttgttatccatatttcagactcaattttagatacaatggtggctttatattttaagtatatagagctactcaaggagttgaatctccccttttctcattaacacaatttttctaagttgatatggtgtactcattaacatacaccaaatttacttttactttgttcagattgtggaatgaatttccaccagttctcttctttttaatgtgtaccctaggaggaattttactgaggttatagcataccccatgagcacagtggggaagaagaatgtgttgttatgtgctgctgctaaacagaagcagcagttgtaatttgtttttcagtttaaatgtggttatagttagatttttttttaagcagcaacttttcaaaaataaaatgtgataatttctgaacttttgtttgtgttgttaatagtggtgtgaaaatattaacgttcttgagaaaaactgataccactgttgtgtatcagtttctatacaatccataatcctcctgtacagtttttacatgtagttatgagtcttactaaaatttatataatggacttgttttcctttaagttgtaaaatgttaaacaccttgaaggttattttggacttctgtatgtttaaatgttgtcttaccaaaatttgcacgaatggaccattttcatttactacttaatatcaaaatcaggaatttacagtcaactgatagtacatgataggtgcatataggacagtttagttacctgctactaaaagatttttagataagttttagaagataaaggaattccatagtttcaggagggacaacatcttctgcactttttttttgcacagaaaagtctgtcattctctaatggcaaatttcatatttgttaattcttggctcaaaatatattaggtaaaattcttagatctgtttttaaagggagtttcctgaaactatcattaattgacattattaccccatggattttatgggataataaatgtttttcatgttctcttataagatactatgtatgaaattacttcagagagctatatttattttaaaataaattagctagggttaaggttatattctatttccagcatagaaggtagataatctaatggtgtagaaagaatcactaggttgtcatttaaccagttattttcatattttgcttaatagtacatatccaaaaagaattttgtacttccccaaatgtaatttatttactaaattgagtataacctaaatgtgtgttttctattttccatttaaattttgctatattaagactaatttaattcgttgagtcttggaatcttctcaaggaggaacaaatattaaaatgacatgtagaaacaaatttttttttttttttttttttttttttttttgagacagagtctcgctgtctcccaggctggagttcagtggtgcaatctcggctcactgcaagctctgcctcctgggttcaagccattctcctgcctcagcctcccgagtagctgggactacaggcacccaccaccactcccggctaatttttagaaacaaatatttaaaatgacatattctcccaatacaatctatttagatctggagaaggaaaaatcagatatttatgatatagttttattttaattttgaattatttgtgtcacagctcagctttttggaagacaaactcaaacacctataatttcatttatatttctaattcacttggaacctttctgctttatgttacctagaaaatgataatttgtttaacccaaaacttctaaaataaattgcttaatccttgaaatatgttattggaaaattttaagcagtgcttaaacaccattaaattattatgaacttgtaattcagaattgagtaaagaaatattttttctagtccttcatatattgaaaacttgccacatgacattgtatcgtcttcattttccagaagatgcgttggtgtgccataggtttctaacttccttgaaaatagttttttaagtcaattgtaaatatacgtattattgttaaaagtaactttaaactgcaacacatagcttcaaaacaatatagagattttgtaataccttataagtggagttggctaaaataccttatccatataaaacttattctattctttgcatgcttattttgtgtgttggttgctagcttaaagtttgatttgttgttactctttgtgtgccaaattcactaggcaagcggatttttcctcagacttcaaaaaataattcttttaagaaaaaatgtaaaaatgtttattctaaaaagctgcattaaagggacaacctataaaaagttttgctagctcatctttagaaggaagaaagaatattagcttgggtgatgtttaatttgggtggcgatagtttctgtaggctaaactttatgagaaaagtgtacctactctataaaggtaataaatgtaaaacctcttgctgttattgaggaagctcttcaactaccctaaatttcacaaatgtaacttataacactatgaaaagatttgaccaacaatttacgtttgctgtgtgctttagtttttgtttaagcatattcttttgcttgaatttctgtgttcatgagagttagggtgttttatgcttcttgaactaattttataacatatttaatatattaccagttaagatataaaatcatttgtacatagcgaattgtaaagcagctattaaagtaggtgaaataaagtatatatttgccggttatccatatcttttagaagtcctgacagaacaaccagtttatttgcacataggtagcttctgtttgaaggaaggtaaagttataaggaaactcaaatactataagatgtgtcaaggtatttctccagaattaattgcaaagctagtgctgaaggattttaatcagcttctaaaattttcttctcaataaggcatatgttttgattacttagggaagattcctcatttttatttgccctttatgcatttaatccacatgataggacattaaaaattaatataaagaaaaatcgtgctcatactgtacatctgtttctgtgcttggaactacttgttaatagtttttatcgaagctgtcagcaataagggacataaaactgctgtattatacattgtggaattgaataaacagcctaattttttttttctagtatagggtacttaagcatttccacttttggaagaaaagtgtattagtattttatattgcatttcatttaaaaggacagttttttttttttttttgtaaatccattcattgaaatggtttctaaactgtataatgtaatttggagcctatttagtaatagaattaaatgtcctatgtagtgctacaatttttgaattagaaagtgatcaaatgtaagaaaaaaatttaaaaattcagcccagaaaacaaaatagtgtattaaattagtttaatgtaaaaggaatttataagatttttttcctcaatatagatacctcacttgaaaagaaagcacagcatacttaaagtagttctagtaaacatgtcctagaaaacagttgctaaatgtaggacatcttttgaggaattagtttatgagaaataaaattttacttgtttttactatcctgttagaagtatttgtttatcctgataattttaagccaacatagtagtcttaaattacttttgaatttctaatctgtgaaggcagtaaatgaaatatctgttctgcaactgttgaaacaaataattggctacattgaccataattaaagttaaaattttgccaatgatgtacagttttatggttaaagttgctgtggttggttgcattacatgacacagaaaactgtcctctacctcacgtgaaataaatattttatatggttttactaaaaataagactcatgtatctggtcacctagtttacaaattttgaattatatttattgaaacatgacatactgtgctctgagcttatacctcaattgtattttgtgctgttttccattttcatgccttgtaaataacttgtatagattgtggatcaaatactaaataaaaacttttaatgccaattaaatttgattcaagtta

SEQ ID NO: 41 - DNA, 7007 bp, Homo sapiens
cttttgaagttaacaaaaattgagtccctggctgggaggtcccccgagtgttccgctgtgggctggaggtggcgtttctgtcgtgatttatgtggagtggttcaaaacagaagttaatcactcgggaagcggacgggaggggcggcgctactgcgcatgcccgggagccgcctggagtttggaactccacattctttcagacccggcccgctgcggggcgttcctggggggtagcctcaaggccagcggggttccttcggctgcgtttctgtgggaggccctgaaacgcgcggagcttccctctgcctccaggctttcccagcgagagtgaaattaaacttgaaactcggatcaactggcagtcgttgttggtagaacgccctaaggacccctccccgcgggacggagggaggactcgggacagggaattggccctgggagaaaacgcgcggggggcgtccgagacgccccgtgaaagccgtgccgacccttgggaggactgacaggtctagagacacgcgctgtctgttgtggtgggcctcccgggaataagtgaggggctctgtgtttcgaggatggttctagcgcagagccgggtgtctgccggggtgggctccccgcattgttcgggctccggcgggggcggctctgattcctttccatggcccgcctcccaccccgggaatccccagtgctccttttccacggcttttctggcgtccccccgactctcccgcggcactttggcctaccttcccccagcgccgtggtcctccctggcgaccccctctgcgctcctggggtcctcctgcgccccccctcctccaccggcgcgctgcccacagccgcgtgccctctccccggagctggggaccaaggctgggccccgccggccgcatcggtgggaacttccgcggtccccatcccagggcgcacagggtccagctcctcggcgccgactcctggaaacaatgaaaggtgacgggctgaaggggaaactttgcgactggttcagggctctttgggggagccgaggctgccgaggttacccgggtttctttccccttttaggtttccctggcgagtcgtctggggtgggcaggcctctgagaaggtgggattcacggcctcatttctagtttcttgggtcctggagttcctttgcttgtgctaactcgtgcagtgtgcgggccggcctgtttcacttgaggccgaggaactctcaagaacaaaagctacttgcttttcctccttgggcccctccctctccccgtgctcctccgccgtcctcctctaaaactacctgggaggggggagccttccccgtcggctctggaaagactcctgaggaagtcgggccctccttactgtcttgtcttataaaagtctgcaaatcttttcaagttttcttaaaacaagtgcactttcagctccattcctgagcccggggtaagcttggtttgtgataatagtgtgtcctcccagaaagctgagagtgacgccaaaagatctcctaaaatgacttaaaaacaatgagaaggatcgataaggaaaatccactaagtctttttgctcccagtttttaactgttgaattcctgctttgggattgctctttggctggggtagccaaccataccttggatttggtggcttgagtgttcaatgcctgttgcttctcccaaggagatactgattttttttttcttttgttcctggagaccgggtctggctatgttgcccaggctggtctcgaactcctgggctcaagaaatcctctcgccttggcctcccaaagttctgggattacaggcaagagacattgctcccagctcaaaggagaacttctggtcaggaaacttgttgagttaaatttgctttttcctaattgtgcatctcgacttttcccatcaatcttatttctagagtctcttcacaaccggtgtctccctgcctccctgtctcatgatgttaccgagctattcagaaaagaaagtgcagggctgggcgcggtggttcacgcctgtaatcccagcactttgggaggcctaggcgagcagatcatctgaggtcgggagttcgagaccagcctgaccaacatggagaaaccccgtctctcctaaaaacacaaaattagccgggcgtggtggcttttgcctgtaatcccagctattcgggaggctgaggcaagagaatcgcttgaaccctggaggcggaggctgcggtgagccgaggttgcggcattgcactccagcctgggtgacaagagcgaaactctgtctcaaaaaaaaaaaaaaaaaaaaaagaacgtgcaggaacaaggtcgctgcttagggcggtgggatcctcaggccatgttgtggctttctccacaacatttccttgtatgtggatagcgtgaaagaagcttgtgatcctgcccccaccctccccaccgccacattttttaaagtgtaagcaaagcaagacgtttggaaacaagtcttaaccgggaaacttttcaaaagcgctgttacaataggaaatgagtaaggaggaaaaaagtctttgtttttccaagctgagccacaactaggagggagagttttaatgaaaacagtcctgacagcagcaaacgtggttttactgcagtgaaatatcagctggcgtagccaaggcactgaagtcttaacttcctgttacttcagcttttgtgcacatattggaaatatttgttaagagttccagaggtctggcattcatttatttaaatgaactgagaacagagtaaagtcgcgctgcagtttggtgttgcttaactgaaacctgcttttgtgtgtcactaacctattctgaaagatcaggcttcttgtcaaactaggcaagcagatcaaagggcagccttcaggggctttttttgtttcaaactctttgtgattaccaacttacagttgggaattcactgttcaatgagcaaattttcacactttttctagattaaaaaaaggaaggagataatagccttgagaagaatgtctggcttttcagacgttggagagtttaaacaaattgctttattcaaatttgctttagtcatttaattaacttaacactttttttaaaagttcgatttctttaattattaaagccaatgtgagacaggaactcagctataatttctttaagctattttattaatagttcttcacccaaatttcaatataggttttgaaagtctcatcttgccaatagtgaaagtagtttcagttttaaatgggcacttttaaaaacctttttaaaaacttaaatcatcaggggaggggaatttcaaatacatggcagttaaaacttaggattcttgtgcagtttatttgtagctgtttgttaagctgtgagctaaagtgaatttgcaagatcatccacctctttgttagaactttactttgtctttggagagttctgccttttgtaggaataccctgcagcaccttctgccccctgcagtccaaaactaaaaatgtgtcaccaagtcagagtcattaaaagggtgggaaaaattcctttaaaaaacacggtgtttagcttaagaggaatattccgtgtttatttcctgtcaaggggaactggctcaattaaggtcaagtcatattttcaaccaaaattacatactacagaggaaagaaagcatacaaagctaaaaatgcttacctttacatttttgttattttaattacttcccctaatatagaagtactgatttttttcaagcatgccattgtttgtaattcatttctgtttttaagattctagattgtctacaagcaaaagaatgtatttctttagtcattcggagtagcctgctgtagtttttgaaaggtggaattaatagcgtttgttatttaattttttttaagttcagaatgatgtttaaatatctgtaaaggccagttctggagctttattgaaccccgtccatctgtgatttaaatattctctatggcttgtgaattcttaaaatttctggcaggattaaagtacttacagccaaaagagcttcctctggggcttgcatattcagtttcctttgtcatgtaatcatttaagactgaactctgcttattgatatgtagtattctattctaggttgagctcaaactggtagctgaaatttaggagacatttttaattcatttagtattaggcatcttttgaccttactaaagtaccagtagtagaaaaatatttttgtgtgatgaaactgaaaacatcagtggtcgtatttaataaaaggtgactagtactgcccatttaaagtaggtgtctaactttgaataaatgtggatagcaatgaataagaaatgaccatgcatggtgttagcagaaaattttaacatgtgttttacctttagaatactaactgggttcagcgtagtatgtaattttccttccttatatccatgaaaaaaaatgtacgagtgctccctttcatttcaaaccttcagtagaggaaggaggaagagtagcatttaaaatgtacattaggactggttaggttgcttttcctagttagcactgatcttagaaagaaggttggtaggcatattccaactgccacagcacccttcctgtttcaaatgtggcaggttattcattttgggtgcagtttgtctcctccaatgattagacgaaagagttttctgaccatcattcaaaaggaatgtgagaagttaatgaatcctagaggaaagcggctgagaaaaggcatctggcatttggttgagagcctcctatgtggtgctagtcaaactacttttacttggaccctgaattcaggacagaaaacactgctccttctcctcgctctcagttgttgggaaagcatggttacattgaatggtcagcgttaagtgagctttgcaatagttgctgtgcttataaagcaactgacaactggcccttgtcctttcctaggtattgttgcagcatctggcagtgagactgaggatgaggacagcatggacattcccttggacctttcttcatccgctggctcaggcaagagaaggagaaggggcaacctacccaaggagtctgtgcagattcttcgggattggctgtatgagcaccgttacaatgcctatccttcagagcaagaaaaagcgttgctgtcccagcaaacacacctgtctacgctacaggtaaagaaagagagcgtgaggtttatggatgcatttttagtttcaaagtcattttatggcattcctgtgtgtcaagtcattaagctccttgccactcaaagacagaaggaatatctttttattgtaaacttgatagtgttaaaagctaataactagctatttagagaacacagaaacacttgacagtcatctatcagatagcatttcctttaatgcctaaaagaaccttcctttatgcaacagacattaaaaggaggttaaaccttactctattgtccaggaaactggtttgatatttaaacaaggacgacttcagtgaggtaattcatgttatgtctgttgacacagtcatttgaactgggaaaaatcagttactgggaggagtggcccttttcataaggagaggttttcctgtagttgattaacttaaatgttggggcagtaggtgataggttaaaatggggagagttaaaaagtaaacctctctctcaaatcatttttaagcatttgagattgtatgtctttttcttcgtcctgaaaaggtttaagtatgaagagacaaaaaaggaaatttgtattagaaactagaaggcttatgacaggtggtagcttgctttcttggcggagctcagataccttgaaataacattgtaaattcagataaggcttttcatgctttctttaattcagagagcaagatcaattaggtaccccatagaacattctcagaacccgttggctgagtgaatgaggaaaatgttaaagcgtaccgatatgatttcaggtctgtaactggttcatcaacgcccgccgcaggctcctccctgacatgctgagaaaggatggcaaagatccaaatcagttcacaatttcccgccgtggggccaagatttctgaaacgagctctgtggagtccgtgatgggcatcaaaaacttcatgccagctctagaggagaccccatttcattcctgtacagctgggccaaacccaaccctagggaggccactgtctcctaagccgtcatccccgggatcagttttggctcgtccatcagtgatctgccataccactgtgactgcattgaaagatgtccctttctctctctgccagtcggtcggtgtgggacaaaacacagatatacagcagatagcggccaaaaacttcacagacacctctctcatgtacccagaggacacttgtaaatctggaccaagtacgaatacacagagtggtcttttcaacactcctccccctactccaccggacctcaaccaggacttcagtggatttcagcttctagtggatgttgcactcaaacgggctgcagagatggagcttcaggcaaaacttacagcttaacccattttcaagcaaaacagttctcagaaatgtcatgattgccggggtgaaggcaagagatgaattgcattattttatatattttttattaatatttgcacatgggattgctaaaacagcttcctgttactgagatgtcttcaatggaatacagtcattccaagaactataaacttaaagctactgtagaaacaaagggttttcttttttaaatgtttcttggtagattattcataatgtgagatggttcccaatatcatgtgattttttttttcctccccttccctttttttgttattttttcagactgtgcaatacttagagaacctatagcatcttctcattcccatgtggaacaggatgcccacatactgtctaattaataaattttccattttttttcaaacaagtatgaatctagttggttgatgccttttttttcatgacataataaagtattttctttaaaaa

SEQ ID NO: 42 - DNA, 15093 bp, Homo sapiens
gtcagtcccagcccaagggtagctggaggcgcgcaggccggctccgctccggccccggacgatgcggcgcgcccaggatgctgccgtgcctcgtagtgctgctggcggcgctcctcagcctccgtcttggctcagacgctcatggtaaggctccgggacgcggcccttccctgccctgccctctccgcgcccgctccattaaagttctccatccagtggagagccctggctggctggccctctggcagagcggtgcccgggtgctcccttactctggcaaacctggatctcaggctcacctgttgtggaagtggaagaggctgaaattgacaggaactgacggattgggaaggatagagaagtatgcgcaaggccaaacccccaacccgcaaacctcatcatccacccacttctagatgagccgtaagtttagctctaggttttttgctgtttaggttcaaatgatgggacttcttgtccccttggggaataattttgatctcctgactctcccttctcttagtcgactcttcaactaacctctgtctgtccttctcccatctcaccttcatccctcactgatcaccccgatctgatcccccttgctccacctgtagcccccaactcactcccactgccccctgcctctctcctcctaacccagccagttcaggcttctaacccagttcaggctcctaacccagacagttctccggcaaggtttctgcaactaagaaaagtaaaccccagagacagaatgaaagagccgggagttggaaggaccaagagcagagacagagagcaaggaccgaaactgcttcttcatgacaccaaaatacaaagtaaaacatgcagtcagccattcacgtgatcgagagctgagtcggagatgtgcagcccaaataccacaacgactcgctgcatttttcactttccgtctaatgtttcgaaatcaaggcactgacgtgaagatcaaagacggtataagaaagaaagcaagagacagatgacagagtcctcccccccaaaaaataaataaaaaacaggtgcatgattagagagatgtagagaagttagaacactagggagcgggagcagagtcgctgtcaaatggagagaacttagaggatcaaggaggagagaaagggaaccaaccagccgttggccttgcacatacttcagtctgcttgatcaacaagactcttaaagtagaaatgtttgttgcattcttacaaagaagacaatgccttcagcagtgtttcccatggtgaatggtgtgtactgggggtaaagggagagtagagctaggaattggtattgagtatctctcctcggagctacaggtgccagctcttgtggggatgtcctcagccatgtgtagagccagagctgatttattccatctgtccttgcccagccagaggttggacatctggctataggcaaagccctcccagaaactagggaatgaggcaagcacttagcttggggagcccaggagacctatgaagagaaggaggcagatgtcagcaagcaggctgtctgtgtacttagtgaggtggctttgagctggagcctgggccaagccagggtggggatcaggtgtgtggatggggccaagcctaggaatagtgctagagcagggacagggattgggcagagccagggactaacacatctgagagctcattgccaacttgcttagccctcggcccctgccttcttccctggtaggcatcagactcagcttggctcttctcagcccccactgcagcttctgatcacagagagcacagggcagtgatttagggagacacactagctctagaatcagacacatgtggattcatgtgcccactctgccccttacgggctccgctggcctcgggcgagtcatagcctctctgaacctccctttcttctttggtaaaattggggtcatcaatgcctgccccccctcccagctgtggtactgacactcttctccccagggacagagctgcccagccctccgtctgtgtggtttgaagcagaatttttccaccacatcctccactggacacccatcccaaatcagtctgaaagtacctgctatgaagtggcgctcctgaggtgaggaaaagggaagagggagggggagggaggagtgaatccccgccttgtcctctactctcctagcatgggaagatacctgccttgttaatgaagtgagtgcctgagggcccctaacacatagccagcagttgacaagtactgactgagactcccttgctgagcaatgtgccgggagctctgggtgaaaaggccagagcctttgctcactccagagtaagaaaagccttgtgccaaggcttttctcttttttgttttgttttgttttgtttcgttgagacagcttctcgctctgtcacccaggctggagtgcagtggcgcaatctcagctcactgcagcctctgcctcctgggttcaagcaattctcccatctcagcctcccaagtagctgggattacaggggtccaccaccatgcctggctaatgtttgcatttttagtagagacgggttttcaccatgttggccaggctggtctcgaactcctgacttcaggtgatccacccgcctcagcctcccaaagggctgggattactggcgtgagccaccacctccggcctccaaggcttttctatcttactggaaaaggagaagcatccacagtacagccagacaacaggggaacactaatgactgtaaaggcagtggggagaagggagagaccaggctgtgctgtaggagccagaaagaatttctggaagagctgggcctactcgtattcctatctaaaaatctgctagaccacatggaaattggtacggggtcccaagaccaagggagacccctcacaatgagctgccgtggactagaggatatagcctgagggctgtcccagtttctcccaatgtgggagctctcttcctggcctcttgcgtctcccttaaaggaggtaggattgagcacaagctcgtttccagtgcctaacctggtatctcctcaggtatggaatagagtcctggaactccatctccaactgtagccagaccctgtcctatgaccttaccgcagtgaccttggacctgtaccacagcaatggctaccgggccagagtgcgggctgtggacggcagccggcactccaactggaccgtcaccaacacccgcttctctgtggatgaaggtgcttttcctcccttgacttagaacatggctctgaagtcccttccagccaggaactctagtctagagcttttctgtctattaccatagctcaccatgtctgccagcctccctggccggagaactagttgcccaaacagggcaggactttggagaatgttagataaaaatagcccaagttgtttgagatttaaaagggaactggagttgtttatcctacagaagagaggtcttggggtgggttgggacagctgagtcaccaggtccaggcctgtgaacttgttttttcagggagggttcagggagaggaagcgaatccatgaacactcagcatagggcagcaagcagtaggcagaatttgggtgaacgccccgcttctttaggggtgaacacccaggggtcatccctttgaaatgggaagtgctactaaagagaagttatggatccctctctggagaggtaagaggaaaggataagcccccaactcagtgggatttttcatcccaccagttgggattgagaaagttttgtgtgcatggagacctcgctctgtaggattcagagttagagccgatggtctaggaggtcattggcttccaaatgcctgcccacaggccactgctcagctggtgcagaaacgtttcccagcaagtgtgtttaaaatatctatttccagggcccagcctcagaaattcagaccaactgtgtcttgaatgggcccagggcatctgtattttttttttttttaacattttgttcttctttgtattttgatttgagcaaggcaattataaaaagacatttttgaggaaatcaccatatttgtatatgaaatggtttttagggcatattactaggtatttgtttgttacatgtgataacagcatggtagttatatttacaaaggtgtgatatgtgagagatacatacttacgtaattaggaattaagtaatacagtgcttgggatttttctttaaaatgctaaagtaaatttcatggggggatattgatgaccctcccctgccaccaattacttcaaaattggcctagtgtttgcaattactaaagctgggactttggaaatcattatattctcttctacttttctgtctattggaaatttctacataaaaatataatcaatgcaatttatcacattaaccatttaaaaaagaaaacaacatttaaaaagaaactaagcaaagttaaagtagaaagaaaatgtcctaacctgtagaaaggtatctatctacacatatctaccataaatattatgcttaacagtaaagtgttgggctgggctcggtggctcacggctgtaatcccagcactttgggaggccaaggtgggtggatcacctgaggtcaggagtttgagaccagcctggctgacaaggtgaaaccccatctcttctaaaaatacaaaaattagccgggcgtggtggcgtgcacctgtagtctcagctactcagggaggctgaggcaggagaatcacttgaactcaggaggcagaggttgcagtgagccaagatcaagccattgcactccagtctgggtgacagagcgagactctgtctcaaaaaaacaaacaaataaacaaaaaacagtaaagtgttgaaaacgttttataaaaaagtttttcttttaattgacaagtaataattctacatgtttatgaggtacagtgttatgtatacataatacatgtataccttgtggaatgatcaaatcaaggtaattagaatatctatcacctcaaatatttagcatttctttgtgccaaaaacatttaaaatattatctttcagctattttgaaatatacagtccattattattactacagtcaccttgccgtgcaataggcaccagaacttattcctcctgtctcactgtaacttggtacccctctccttgttccctatccacttctcccacctgcctccttccagcttctggtaaccacttctactctctacttctatgaattgaattctaaaagaattctacttagattctatacataagtgagatcttatggcatttatctctttgcacctggcttatttcgctcatgatgtcctctaggtccatctgtgttgtcccaaatgagagtttccttttttttcaatttgagacaaagtcttgctctgtcacccaggctgcagtgcaatgtcttgatctcatctcacttcaacctccgcctcccgagttcaagagattctcttgcttcagcctccttagtagctgggattacaggcacgtgccaccatgcccggctaatttttgtatttttaatagagatggggtttcaccatgttggccaggctggtctcggactcctgacctcaaatgatccacccgcctaagcctcccaaagtgctaggattacaggcgtgagccactgggccgggcctcagtttcctatttttcaaggctgaataggattctgttgtatatacataccacatttaaaaaacccattcatccattggtgggcatttccatatcttggctgttatgaataatactgcaatgaacgggggatacaggtatctcttcaatacactaatttcaatatctttcgatatatacccagtagtgggaattgctggatcacatggtagctctatttttagattttcgaggaacatccatactgttttccataatggctgagaaattcaccaccagcgacatgcaagggtttcccttttcaccacatccttgccaatgcttgttacttccatcttttggataatagccaatctaacaggtgtggagtggtatctcattgtggttttaatttgcatttctctgatgattagagatgttgaccattttttcatgtatctgttggtcatttgtatgtcttcttttaactgtctattcaagtcctttacccattttaaaaacaggtttatttgttttcttgttattaagtagtatgagttccttgtatattttggatatgaaccccttattcaatgaacatttgtaaatattttccacccattcatagattgtgtcttcactctagtggttgtttcttttgctgtgcagaagctctttagtgtgatgcaatcccatttgtctatttttgcttttgttgcctgtgctttagggatcgtatccaagaaatctttgcccagaccaaagtcttagaactttgccccaggttttcttctggtggtttttatagtttcaggtgttacatttgtctttaatccattttgtgttgattgttgcgtaagaggtgagacaaagatctattttcattgttctgtttgtgaatatccagttttcccaacaccatttgttgaagagactgttcttttcccattgtgtgttcttggcccctttgttgaaaatcaattgtgggtttatttctgggctgtccatcatattccattggttgatgcatctgattttagggtatatgtatttttaatgtgctccccaagaagtccttacattctgctgcattgacaaacctgtggccaagttttaggcctaggttctaattaagcttaattctggaggcaaagtctcggcggggacacccaggccctcctcagccctcaagtctcatggtattcccccccaccccaactccatttagtgactctgacagttggcagtgtgaacctagagatccacaatggcttcatcctcgggaagattcagctacccaggcccaagatggcccccgcaaatgacacatatgaaagcatcttcagtcacttccgagagtatgagattgccattcgcaaggtgccgggaaacttcacggtatggggttccccaaggccccagggccagaactcccttggcttccctgtcccctgggctggaagcacccttgtgtgccattgggaactttgcttatggactaaagggagggtctgggatggtgggtgggcagaggagggagtagaaaccacctcagccctcagagctatgctcttgtgagatgctcctcaaaggaattgcctactagggcaattgggcaccccagagcccttgtagatgaagcaataaggctctgagaggctgtgtaacctaccagagggcgcccctgttatgggagagctggcatctgcaaaatccaccctctctcctctccaccactgttgattccagccccttctgggaagatcttcagcatctataaaacaccgctttttcttttaaaatacaaaataaaattgtggtcattacagagatcatgtgctgcattggtaattgtggggtttgtcatcttagacaaaggatactgaagggggttggctgaaatcacctctaaaggcccaccagctctcagtgtccgtgtgccatgaaataaaaggattttgttaattgctatcatttttgtttcagttcacacacaagaaagtaaaacatgaaaacttcagcctcctaacctctggagaagtgggagagttctgtgtccaggtgaaaccatctgtcgcttcccgaagtaacaaggggatgtggtctaaagaggagtgcatctccctcaccaggcagtgtgagtcagctgggctgctctcagcatggggagggagactgggagggcctggtgcaatccaaaacgcgtgcacctgggatgctggtgccagccactgtgttaggtgctgcttcacatagctctgcatccttaataggagagaggtcctactgtcctcattttagagatgagggaactgaggctcagtattagcaacttcctagggttgcacagctaggacttggtggcagaaccaggtctcttggatctagggtcctcccactggagcacagcggtgtttcccaacaacatccccctcccccggggccatcttcagtgagctgtgctagttcctgttgttacagtcttctgctgttcttcctcagagccagggatacaaagggcttctccttacttcccctactctgctctgctcctcgccagagctgctaaagtcagcaaatactgctccaggctgtcagtcaggtgccggggctgtagggggagggagataatagaggacatggaggccacggtcttgcctaggaggatcttgcatcctggctggggagatagagtgtgcacagaggagactgtaacaagcaactcttattggacagcagatgagatgtccagtgcccaatgaaacatgccaacagtaagtgctctgggagggcccagtccagtgtgggcagagtctggcaaaggtgaaagtgactcctgctagatctgcaacaaatttcagtttgtgaaggacactcaacagctcagtgtcatttaagtctcaatgcagaggaaggcactaagtgggtatcaggcagtcttaagagtttttcatacattcattcactgatacatgaaatagttccaaatctcagctttacaacttttgaggtatatgactttgggcaaattacttaacttctatgtgcttcaggatcctaatatgtaaaaatggggctgatgatagtatttacctcctataagtataaaagttaaaagaatctgatggtattggtacatggtcagtgctgtgtacttcacaactaccttatgaggtcagtggctctgacagagtaattaatttgtccacaattgcacagctagtaagtggtgaagctgggacttgaacccagatctagcagcccccggagcctcgattcttacctgctgtaccatcctgcctcactgttctgtttgctgtgatgggagtcatgtgcagagagctggaagcagttagcgcatctcctgagggaatccttcagggcatggtttggaaggccaggtagggattcgcagaaacctagacacatctagagttgtggcctgtagtttgccttgggccactcactgaatggttcctgacagtgggcaatggatttcatgggaccagagtcctatgtccagaatcaccgtgccccatggtgacaggccacaaacacatctctctgggcctgcagatttcaccgtgaccaacgtcatcatcttctttgcctttgtcctgctgctctccggagccctcgcctactgcctggccctccagctgtatgtgcggcgccgaaagaagctacccagtgtcctggtgagtcttgcaaggaggtcactgccccgtccttcccagccacacccgagcttccaggagggcagggagctcttttcctcccagccagtccattgccttagcttgcctctgctctcagccctgatgtgattgggagataccttcatcaagcgctgtggggacagagggaggaagtgagcatgaagcccagtaccgagaatgttgccatccagtagctcagatgagacacatggaatcacaaatctcaatgaccacgagccattttgatatgatctactagtagttggccatggactagcccctgtgcattgcatctctgattatgaggcacagttattatccccatttcataagtgaggaaactgaggcacagagagattgttacacacagagggccacacagccaggaagagtcagggagggaacccactttcctactgctattagccatgggtgttccacaagagagaaagaaggaaaggccagaagtgctggtcctcgggctgctgccagagtgggccagaggagagaggacactggggggcggtggggatgctgcgccactggagaggggatgctggcaggggacagggaggggctcatggaggaggccaagccctcctcccctcccagggtgtgtcctcttgctacattgtactgacaaatgatacatttgtggcaagccagtctccaaaactcagcttgcaaagattgggcagcattttccaaacctcggcctggtctctggcctggagttcaggccgcattgaagattgcccaccatagcctccatagctggcactattgcatgatggctgagggatcagctgggaaggaaccagctccgtctgcaaggcaggggccccacaactggaaggggaatctccagagcgatcctgggatctctagggaaaacaagacgagagacaagtgcagtggcacaatctcagctcacttgcagcctcaccctctcaggttccagtgattctcctgccttagcctcccgagtagctgggattacaggcatctgccaccatgcctggctaatttttgtatttttagtagagacggggtgttgaccaggctggtctcgaactcctgacctccggtgatatgcccacctcggcctcccaaagtgctaggattataggcatgagccaccgcaccctgccccttctgtacttttggatcacagaactgacttgtccttgagggttttttctcttcaggataaatatagctcaatcccttcatctgatgatcgtagtcattaccacatgaataaattataatgcacagagcactgacacattcattagtttgttctcattcattagcttgtttgatttgatctttcaacagttcatcaaggtaagtattattggacaaggaagggatttcaaatcaggacagttgaggatgaattccagatgtgttctttactgttgtgccactttgtgcaagtcatttaacttctctgagcttcagttttctcctctaggaaatagaggtaataatacttctcttacagaattattggagggtaaagttcaattcaacatatatttattgagcaccttctatgtaccacactttgttctaagcactgtagacacattacaacataaggaggcaggtactgtcattatttccatgttacagatgaggaactaaagcacagagagggtaagtaatttggtcagggtgacaaagctgataagagtcagagctgggatttgaacccaggaagtctggctctagaggacacatcctaaatcaccaagcaatgtgataggaatagggactcaaccaataagagctgcatttgaatcatcatgtaccaaggaaatgagggcagatgtgcaacagtgagtcagtgagtcagtcggcagaccttaggagggcctactgtgtgccagctcagtttagactctggagacagggtagtaaacaacactagacagttcctgccctcaaggagtttgtgttcttttgggaatgtggagtaagtgagtgtgtgtatggtgagagacgaaaacaaacaagtaaaataattctaggaacaaagtgctaggaagaagtaacagggttaatgtggagagagtggcaggagtactgctttaggcaaggtattcaggaaggctttgctgaagaagtgacatctgagctgagacctaagccatgtacaggacacagccatataaagtgccgagagcatttcaagcaggagggagagtgtgtgcaaaggccctgaggcagcacggtgcttgatgtgttctgggacagaaagaacaccagtgtggctagggcagaggggttatgtggcttccttgaaacccttggcaattaacagagagcagccccttcactgtgagttccacacttgtgccactgccccacgctgcagccaccatgttcgcgtgagtcactactcggggaatagaaaacttaatttggtgtcttacatccagaattttagaaaatgaagtaggcaggagggcatagactgggatacaatagaataagaactgcagaaatatcgtggcacagctcataatgatgagtattattttgtgaaactggtttcagttatttacatacgggttatatatacaagtcattatgcaacttatttctgattttgagtcatagtcaaaaaagtttgaaacatgcttctagatgggtctagcctgctttcaggtttgaaaagcactgtggatggagccacctgagagttttcaccatgctcagcagaccttggttctgcctgttactccatctgggcctgagaatacaagtttcttgtgtatctggcctgagccaaactgggaattgcattaggaggaaagctggattcgaaaacaaaacagaatacattccagtgtaatttagactgtagtctcctccatcgagctctcctcctgggcctggccttccccggcagcactgggatgggtgctggaaggtgactcctgcttctctcactctgccctctcttccccagctcttcaagaagcccagccccttcatcttcatcagccagcgtccctccccagagacccaagacaccatccacccgcttgatgaggaggcctttttgaaggtgtccccagagctgaagaacttggacctgcacggcagcacagacagtggctttggcagcaccaagccatccctgcagactgaagagccccagttcctcctccctgaccctcacccccaggctgacagaacgctgggaaacagggagccccctgtgctgggggacagctgcagtagtggcagcagcaatagcacagacagcgggatctgcctgcaggagcccagcctgagccccagcacagggcccacctgggagcaacaggtggggagcaacagcaggggccaggatgacagtggcattgacttagttcaaaactctgagggccgggctggggacacacagggtggctcggccttgggccaccacagtcccccggagcctgaggtgcctggggaagaagacccagctgctgtggcattccagggttacctgaggcagaccagatgtgctgaagagaaggcaaccaagacaggctgcctggaggaagaatcgcccttgacagatggccttggccccaaattcgggagatgcctggttgatgaggcaggcttgcatccaccagccctggccaagggctatttgaaacaggatcctctagaaatgactctggcttcctcaggggccccaacgggacagtggaaccagcccactgaggaatggtcactcctggccttgagcagctgcagtgacctgggaatatctgactggagctttgcccatgaccttgcccctctaggctgtgtggcagccccaggtggtctcctgggcagctttaactcagacctggtcaccctgcccctcatctctagcctgcagtcaagtgagtgactcgggctgagaggctgcttttgattttagccatgcctgctcctctgcctggaccaggaggagggcccctggggcagaagttaggcacgaggcagtctgggcacttttctgcaagtccactggggctggccccagccaggccctgcagggctggtcagggtgtctggggcaggaggaggccaactcactgaactagtgcagggtatgtgggtggcactgacctgttctgttgactggggccctgcagactctggcagagctgagaagggcagggaccttctccctcctaggaactctttcctgtatcataaaggattatttgctcaggggaaccatggggctttctggagttgtggtgaggccaccaggctgaagtcagctcagacccagacctccctgcttaggccactcgagcatcagagcttccagcaggaggaagggctgtaggaatggaagcttcagggccttgctgctggggtcatttttaggggaaaaaggaggatatgatggtcacatggggaacctcccctcatcgggcctctggggcaggaagcttgtcactggaagatcttaaggtatatattttctggacactcaaacacatcataatggattcactgaggggagacaaagggagccgagaccctggatggggcttccagctcagaacccatccctctggtgggtacctctggcacccatctgcaaatatctccctctctccaacaaatggagtagcatccccctggggcacttgctgaggccaagccactcacatcctcactttgctgccccaccatcttgctgacaacttccagagaagccatggttttttgtattggtcataactcagccctttgggcggcctctgggcttgggcaccagctcatgccagccccagagggtcagggttggaggcctgtgcttgtgtttgctgctaatgtccagctacagacccagaggataagccactgggcactgggctggggtccctgccttgttggtgttcagctgtgtgattttggactagccacttgtcagagggcctcaatctcccatctgtgaaataaggactccacctttaggggaccctccatgtttgctgggtattagccaagctggtcctgggagaatgcagatactgtccgtggactaccaagctggcttgtttcttatgccagaggctaacagatccaatgggagtccatggtgtcatgccaagacagtatcagacacagccccagaagggggcattatgggccctgcctccccataggccatttggactctgccttcaaacaaaggcagttcagtccacaggcatggaagctgtgaggggacaggcctgtgcgtgccatccagagtcatctcagccctgcctttctctggagcattctgaaaacagatattctggcccagggaatccagccatgacccccacccctctgccaaagtactcttaggtgccagtctggtaactgaactccctctggaggcaggcttgagggaggattcctcagggttcccttgaaagctttatttatttattttgttcatttatttattggagaggcagcattgcacagtgaaagaattctggatatctcaggagccccgaaattctagctctgactttgctgtttccagtggtatgaccttggagaagtcacttatcctcttggagcctcagtttcctcatctgcagaataatgactgacttgtctaattcgtagggatgtgaggttctgctgaggaaatgggtatgaatgtgccttgaacacaaagctctgtcaataagtgatacatgttttttattccaataaattgtcaagaccacaggaa

SEQ ID NO: 43 - DNA, 30875 bp, Homo sapiens
cccgcccatctccgctggttcccggaagccgccgcggacaagctctcccgggcgcgggcgggggtcgtgtgcttggaggaagccgcggaacccccagcgtccgtccatggcgtggagccttgggagctggctgggtggctgcctgctggtgtcaggtgaggggtccgcggggagggggcgcgcttgggaaccgggaggccccgcgagatgccgcccctgatcccatccctgggcgccctgcaagtgacttaagagccttcggggcctcgggagagaagatgcaaacgccacggccggctgctgagacgcaactaggctgctgctgccgtcgattctgtaacaggagaaagccccatccgcgcccggattacagaccgtctgggccctaaactcagggggagactcccggcgtcttttgattccctgtcctcctgcagctctctgctggcgggcgtctaaataaagtagcttccccaaaagacccaagatcccaccgtggctgtcatctgacccttctggagactatcagttcaagtggaggcccccaccagtccccgagtgccctgacagccctccctgaccccaagtctgccccctcagtgccagccctccctacagatgtgcctcccatcacccgctgcacctcccctccttccggttcaggcccgagcaccctgaaatctggattctgtcccccagcgccccagctccatggcttctaaacctaaatccattgaaaccttttctgtcctctaaattgactgcctaggttccaataacaccatggtcacctccttcctttctcatgaactcttccctggccttccgggatacccctccggtttcccgccctgtcaggctgtctctgcttgggaccctcctgctctgtcaggtttctatgtagctaattgtgatgcccaaggccttttctctccttccctggcactgttcctttgggggatttcagccaaaccctggcattaaacacgggctataggcccatgactcgcacatttatatctctcttggtaccagttgggtgatgggtggtggtttattatagtcttctacttttctacttgcatgtaggtttcaaattttcttttctttctttcttcttccgtttttttttttgtttgtttgtttttttgtttttttgtttttttttgagacagggttttgctctgttgctgtggcccaggctggagtgcagtggcttgatcttgcctcactgccacctccgcctcccgggttcaagcgattttcctccctcagcctcccgagtagctggaattacaggtgtgtgccactacgcctggctaatttttgtatttttattggagatggggtttcgccatgttggccaggctggtctcgaactcctgacctcaggtgattcaccttcctcagcctcccaaagagctgggattacaggcgcgagccaccatgcctggccaggtttcgaattttctattaaaaggtttgaaaataatttctgtctctagcccacatctcttcttggtgtgacctctgggctcattcatctggctgtctccctgacattcctacttcagcctctctccagcatctccaacctaatgcagctcaaatgggactcgtgagttccccagctgagctccaatcggggcaccagctgcttaagcccaaaatggacattgacctcagcttttatgcatcaaatgtatcaggaagtctccagtttgtttttacgtctggaaatatatctgaaatccatgtgcccaccctaccccctcatagctttctgccaccagacaaatccaaggctcctttgtctgtccccattttactcctgcccctccagaaatttctcctcacggctgttcaaagaaaatctagactcctcagcacagccaacctgtctctccctccctcacccacgtggcctttgaagacatggagccatagaggagaaccaagtgctggatgtgggctttttcatgggcatctgttttgaggagaaaagttgtaaatgtttttgtcttattttcatagcattgggaatggtaccacctcccgaaaatgtcagaatgaattctgttaatttcaagaacattctacagtgggagtcacctgcttttgccaaagggaacctgactttcacagctcagtacctaaggtgggtctggcctcactattggcaggaacgcaccggaggagccagccctgggctggtcactgggttgggccacaggaggaagggagtctgactacggtcaccgtgtgactgtgacaaccctcagggagcctccctgccagccttttgctgtctgggaaattctcgtggccaccttttctcttttaggttttctagttgtgatggttgacgatttgactgttaatcacagggctgctggcagatacagacattttatcatgcgtatgtagatataatcagccatagtggtaacctcatgctgtgcccatcccagcttgtttgtcacagttgatatattttaaaagaaaaataccactgctgtcatctctaggtatgagtagtattgctggaagtcagcaatgttgagtggatgctacccaagaaactgagatatgcaaagcggtcaggaagccccttgctaccatatatcacctgttcccctccaatggattataacatcatgccccagtgccatgcgcgatgcacataatttgcataatgagtgctcagtttctccgtggttccatcctgaaattaaaagtaagacagctactgactgttaaaaaccccattctcggacaacagcaggggctgtgaaggaagagtgagtgtcaccctagacggtcatctcagtggtgatctgaacgccctctacctctcctgcctgtcagtgtttccctacgcctggtgaaggaagtcagtgccagcactcccttggcagcctgccaccatacgccacatgctggactgcaggtgacacacctttaggccaggcgcaaacagcagcaggaggcccaaggctgacaagccaacacacctgctttctgtgtgactcagaaacatacgaagatagacaagtccttcagtgaggcaggaggaaatttcttcccagatccagctgtcatttcacaaaaatccccaaggcctgctacatcagagaagaagtagaaaggtgaataagatagtcctcgtctgtgcattgctggcttttgttttttaacttttagttcaaaataattccagactaacagaacatttcaaaattttaagtagaatacaaagaatttccaaatagcctacaatcagattcaccaatttttttttttttttttttttttatgagacggagtctcgctctgtcacccaggctggagtgcagtggcgcgatctcggctcactgcaacctctgcctctcgggttcacgccattctcctgcctcagcctcccgagtagatgggagtacaggctcccaccaccatgcccagctaattttttgtatttttagtagagacggggtttcaccgtgttagccaggatggtcactatctcctgacctcatgatccacccacctcggcttcccgaagtgctgggattacaggcgtgagccaccacgcccggcccaggttcaccaatttttaatgttggtcacattctctcccttcctctctctctctcatgccctttgtgctgtaatatttcactgtgtatttcacaagaacaaggataatctcttacatcacatagtacagtgagaagctcaggaacttttacattcataaaatacttgtatctaatttacagtccatagtccagtactgtcagctgtcccaaggattgaaggagggcatactctataattaatttttttcctgatgtgcattttctagtactgattggctttatcatttgctttctgtgctgtctctactcagtctgaatagccacggagattttactgtggaaaattaaatttcttctctgtctgtctgtctccctgtagtttttcttgttctgtgctgtgcttttgggtttgtttgtttgtttttcttttttttttttttgagacggagtctcgctctgttgcccaggctggagtgcagtagcgcgatctcatctcactgcaacctccgcctcccgggttcacgccattctcctgcctcagcctcccgagtagctgggactacaggcgcccgccaccacgcccggctaattttttttagtagagacactgtttcaccgtgttacccaggatggtcttgatctcctgacctcgtgatccacccgccttggcttcccaaagtgctgggattacaggcgtgagccaccgcgcccagcctttttttttttttttctttgagacagggtctcactctgtcaccaaggctggagtgcagtggtacgacctctgctcactgcagcctccacctcctgggttcaagcgattctcctgcctcagcctcctgagtagctgggactacaagcacatgccaccgtgcccaactgatttttgtacttctagcagagatggggtttcaccatgttggccgagctggtcttgaactcctggcctcaagtgatccacctgcctcagtctcccaaagagctgggattacaggcgtgagctaccacacccagcccatgccatgcctttttgccattatagtcgaggcacttggctttgcatgtttatcttttatgttagcgatcccaatgacttcatgaagtgacttcatgagggtatccacacctgggttccaggtctcccccgcgtggaactacagagtgagtatggcatgtgctggagaaaacaaaatatgtgctggccgtgtccttggggaagatatttgatccctaaagatgtgattgcctcatgtggctctacaaaagagttgtttagagtttagcatgagcaattgcacagcacaaactctctgttgtttgcgtgcattggggcagggcgtccagagccgggggcacttcagaggatgtactggtgattttaatataaaaacatccaaaacaattagatgtaaatatgaggaatgggtcatattacctatttaatgcggggagaagtatttgtacatgcaataaaaataacctagtgaaggccaggcgcggtggctcatgcccgtaatcccagcactttgggaggccgaggtgggtggatcacctgagatcaggagttcgagaccagccttaccaacatggcaaaaccccatctttactaaaaatacaaaattagccgggtatggtggtgcatacctgtagtcccagctactcagaaggctgaggcaggagaatcacttgaacccaggaggcagagattgcagcaagctgagattgcaccattgcactccagcctgggtgacagagtgagactccatctcaaaaaaaaaaaaaacctagtgaaaaagatgttattgcaaaacaacttttgaaatactgcacatgctggacaattgatgcattagtttaaaagaaggaaatgggccagtaatcccagtactttggggggccaaggtaggataatcatttgaggccaggagttcaagaccagcctgggcaacatagcagcctcttgtctctacaatttttttttttaattagctggacttgagttggaaagaaggaaggcggaagggaagaaagaaggtagggaggaaaaaaaatatggccacatgtgagaaaacccccttaatgaaatgaccgctggattttccaaatgatgggatgttaagcagccgtgaagaaatggttgattgacaaatatttgtggtatattaagtgaaaaaatagcatgatcccaatgatctctatctactttttgcaagggatttttctaggtatcactaagaatgctgtgagatgtgatgtgctaccttagactatgaagtcaaacagatctgagttcagttgggcagatttcttaggctctccacgcctgacccctgtgtacttaataaatgttggctgttgttatttttatcaccatcactttcatcatcacttctgggagcaaccaaattggttttggcaccagaagatgtcttgggggaccaatcagatagctcctcacttttttattttattttataaatttttaaattaaattaaattaaattttttgagacagtgtcactctgttgcccaggctggagtgcagtggtgcaatcacgtctcactgcagcctccacctcccaggctcaagcgagcttccctccttagcctactgagtagctgggactacaggcgcatgccaccatacccaaataatttttttattttttgtagagacaaggactcaccacgttgtccaggctgttctcaaactcctgggctcaagtgatcctctgcctcggcctcccagagtgctgggattataggcgtgagccactgagccgggccagctcctcactttttgcaggatgagagcctgggcttcctttgatcacgtggagccaattacacctccttggctgttgcgagcttagattcaggagattgtatttccctagcatccaacaggcatgtccaaatgtcatctcttttcttccacttcactttctgtcatgttccctttagcggttgctgtcggggctggtgttctgactgagactgatgaattgttttataatttttccagagtaattgcaatgatagtcatttataggacaggacagtcacgggtcacttaacaactggggtagattctgagaaatgcatcattagacagttttgctgtgtgaacgtcatgcagtgtacttgcacaaacctagatggtgtagcctcgtatacacctaggctatgtggtttagcctattgccccaggctgtaaacctgtacagcatgttactgtactgagtgctgtaggcaatcgtaacacaatggtatttgtatacaggcatatcacagagataaggcagttttggttccagactaacacaataaagctaaaaccacaatagagtgagtcacatgaatttttttgtttcccggtgcatctaaaaattatgtttatactgtagtccattaagtgtgtgatagcgttatgtctaaaaaaatgtgcacagcttaattttaaaatatttacttgcggaaaaatggtagcaatcatcagagccttcagcaagtcataatccttttgctcgtggagcatcttgccttgatatggatggctgctgactgatcagggtagtggttgctgagttgcagtgactgtgacaatttcttgaaataagatgacaatgaagtctgctgcatcaactaactcttcctttcatgacagatttctctgtagcatgagatgctgttcggtagcattttactcacagaagaacttctttcaaaattggaatcctttcaaaccctgctatcaactaagtttatgtaatattctaaatcctttgttgtcatttcaacaatgttcatagcatcttcaccaggaataaattccatctcaagaaaccactttctttgctcactcattagaaacaactcttcatctgttcaacttttatcatgagattggagcaattcagtcgcatcttcgggttccgcttctaattctagttatcttgctgttttcaccacatctgcagttacttcctccactgaagtcttgaaccccttaaagtcatctatgagggttggaatcagcttcttccaaacccctgttaatgttatattttgacctcctcctatgaatcaccagtgttcttaatggcattttgaatggtgaatcctttctgggaggttttcaatttaccttgcccagatccatcagagaaatcactatctatggcagctataactttacaaaatatatttctttattttattttatttcattttattttattttttaagatggagtctcactctgttgcccaggctgaagtgcagtggtatgatctcagatcactgctgcctccacctcccaggttcaagtgattctcctgcctcagcttcccaagtagtgacaccacaccaggctaatttttgtattttttttttagtaaagtcagggtttcaccatgttggccaggctggtctcgaactcctgacctcaagtgatttgcccgccttggcctcccaaagtgctcagattacaggcatgagccactgtgcccagcttcaaaatatatttcttaaataataagatttgaaagtcgaaataactccttgacccatgggctacagaatggatgttgtgttagcaggcatgaaaacagcattaatttccttttaaatctccatcagagttcttggggaaccaggtacattgtcaatgagaggtaatattttgagagaaaactttttatcctgagcagtaggtcttaatactgggcttaaaatattcagtaaaccatgctgtaaacagatgtgccgtcctccaggctttgttgctccatttgtagagcacaggcagagtagatttggcataattcttaagagctctctgattttcaaaatggtaatccagtgttggcttcaacttaaagtcaccagctacattagcccttaacaagagtcagcctgttctttgaagctttgaagccaggcattgacttctcctctgtaactatgaaagtcctagatgacatcttaatagaaggttgtttcatctacattaaaaatctgttgtttagagtatccaccttcatcattttagctagattttagctagatcttctggataacttgctgcagcttctacatgggcacttgctgcttcaccttgcacttttatattatggagatggcttctgtccttaaaccttatgaaccaacctctgctaacttccaacttttctttttttttttttttttttttgagatggagtctcgctctgttgcccaagctggaatacagtgacacaatctcggcttattgcaacctctgcctcccgggttcaagtgattctcctgcctcaacctcctgagtagctgagattacaggtgcatgccaccatgcccggctaatttttttgtatttttagtagaggtggggtttcaccatgttggtcaggctggtcttgaactcctgacctgatgatccgcccacctcagactcacaaagtgctgggattacaggcgtgagccaccacacccagccccaacttttcttctgcagtttcctcacctctttaagccttcacagaattggagtgttagggtcttgctgtggattagactttggcttaagggaatggtgtggctggtttgatcttctatccagaccactgagactttctgcatattttcaataaggctgttttactttcttattattaatgtgttcactggagtagcactttaaatttccttcaacaacttttcctttgcattcacaacttggctaactgtttggcccaaggggcctgttgtggcctgcaatatgccttcctcactaagcttaatcctttgcagcttttggaatagggatgcccgaggagaaggagagaggcaggagagtggacagtgggtggagaagtcagaacactcacaacatctattgattaatttcactgtcttatataggtgtggttcatggtaccccaaaacaattacaacagtaacatcaaagatcactgatcacagatcaccataacacatataatcatgatgaaaagttttgaaatattgcgagaattaccaaaatgtgacataaagacatgaagtgagcatgtgctgttggaaaaatggcaccaatagacttgctcaatgcagggttgctgcagaccttcgatttgtaaaatgcaatatctgtgaagtacagtaaagcaaatcacaataaaatgaggtatgtctacatctaaatgtatttaaacatagaaaaggtacagtaaaaatacagtatcattatcttagggcatcaacgttgtatatgtggtctgtcatctaccgaaatgtcattatgcagcacatgactttattgaaaatcattgtaatatctttattttggtaaatttttgtaaatcaatgtctcataaatcacatgcccctgttttcaaaaatacgtaatcaaggaagcaagctttcttggtcaagtatgctgaatactcaaccccttggagaggcacgtagtcattaagatgttcaagtctctgagaagttctgttttgaagacacgtatttctatgtttaacacagtttccactcccgcgccgcccccccctccaaattaagtaccagtcagcctcagggagactgaagccagaactctcctgattgacctatctttttgattgtgtagttataggatattccaagataaatgcatgaatactaccttgacggaatgtgatttctcaagtctttccaagtatggtgaccacaccttgagagtcagggctgaatttgcagatgagcattcagactgggtaaacatcaccttctgtcctgtggatgacagtaagccattttgttttccctttttttgtaatgtcatcatcttgccttgtttttttccacattggttggtccatcaacaagaattctttgagggcccacaaatggatggccttgcacaaggagcttaaggaatataataaagagagttgtatccctaaagaattcatgggagagacagaaaaagataggcatatcatcaatgcaacaattaaatataaatctaacaccttcagtgcctcaaggatgtgactatgttggggcccgtgctgttgaggagaagttctggaaggattcttgtggtgaattttctgggagaaagtcagtatggaattatgacttaaacaaagaaacataacgtgataggcaaaagaatgaaggcagatgtagagatggaaaatatgatgcggacagccggcttgcccagagcgaaggacagagggagggatagggctgatggcaggtgggttgggtcagactggttggtcagcatcaaaaattgttcccaggttaggtggagattgcagtgagccgagatcacgccactgcactccagcctgggcaatagagtgagacttggtctcaaaaaaaaaaaaaatattgttcccaggttagatttggagggtcatggtgaccaccagagtcccctaaatatgagatgagcatatttagaatatcaggaattgaaaactaattaaaccatatattagcaattgagagagtaaagaagattagaggttaaaagaacctaattcacaaaattcacatacagcccttcaaaactcacatagagaaaagcactaaaagaattgtctctggctaggcatggtggctcacgtctatgatcccaacactttgggaggctgaggtggtggatcacttgagcccaggaattttctttttttctttctttctttctttttttttttttttttttttgagacaaagtctcactctgacacccaggctgaagtgcagtggcgcgatctcagatcactgcaaactgcctccagggttcaaatgattctcgtgcctcagcctcctgagtagctgggacttcaagtgcctgtcactatgcccagctaaatttttttgtatttttagtagagacggggtctcaccatgttggccaggctggtcttgaactcctgaccttaagtgatccacctgcctcagcctcccaaagtgctgggattacagacatgaaccaccacacttgtccttgagcccaggaatttaagaccagcctgggcaacatggtgaaaccctgtctctacaaaaaacaaaaaaaataccaaaaaaaaaaaaaaaaaaaaattagccaggcatggtggagtgtgcttgtagtcccagctacttgggaggctgaggtgggagagtcatctgagcctgggaagtcaaggctgcagtgagccattatcacaccactgcactccagcagcctgggtgaccagagtgaagtcttatctcaaaaaaagaagtgtctctatatggggagtggtctttatgccggtccctgctctggacccccatgacccctacagttacatcctccctggtagagaatgatgctaggatgcctttcttccctttcccaattccatcccaagcctgggtaaaaacgtcttacttttggaatcataaattatcaaagttagattatattttctaatggtacctttacaaaaacaaaggaaagatgaacagaaaagtaagtttcacaatagttaaaagtacaagtttttgctcctataattgctaactggcttaccaggtcctaacttgtcccaaatcctgttagctcccatccatggaagttccctttagagcctaggtacaacacggttaagcagcttgtcaaaaagtcatacaggtcatgagtggctgagcaaggattcagacccaggctcttgcttctgtgctcttagcaactactacccaatattggagatttgcctcttgaagtctatgtattttagtgataggaaagtgtttccaggcatcatgcataacctatttatacttgctttggcaaagtattccaacaagttttcttgtctggttttcagacgagcactttagaatgatggaagcaggtccattaacagccctgaaaaagtaacagcagccaaagaagaatacaggacataactcaaacaccatgattgcctggaaccatttatgaatcattctatagttattattgagtacatctgtgtaacagctgcattctgagcactgaagctacaacaatgaacgagacaaaatacctcatggagcatatatgtgctaatcaggaatacagataataaataaatagatacatattacatgacaggtagtgactatggttcttaagaagactgaagcaaggcaataggacagaaagtaatgggagctgcacttctacatagaatggtaagatacagtctctctgaggaagtagcatttgagcagagacccatatgaagtgaaggagccagccacatgaatatctagtaaaagagcattcagaagggaaacagctttagacattgttggaaatatatatggttaattatatatgttaaacatgtaaaggtggccactaaaaataatagagatgccatctgtagcttccatcctgaaaaaggaaataaaattcaagccaacaaaaagcaggaataaaagaggagaagacaccaaaaacataaaatagaaatttaaaaagaaatccttatagaaaatacaaaatagcgtagctggaataattccaaatgtatcagaaaccacaataaacataagtggactaaacttcattaagaaagacaaagattatcagattttttaaaagaaactaaatccaactacccttcttagccatgtcaatcaatgtcatgacaatagtatatcaaagcagtgtacttccgtggactaattgttctgcatggttatgaaaaattaatgttgaagtttttaaaatgtgatttttgattgtcattttgcttgttcttctgcttagccattattggaccccctggaatgcaagtagaagtacttgctgattctttacatatgcgtttcttagcccctaaaattgagaatgaatacgaaacttggactatgaagaatgtgtataactcatggacttataatgtgcaatactggaaaaacggtactgatgaaaaggtaaggttggctaattgcatttcagaggtagtaggctttcatattctttgcagaatcttgcaaggtggcagcaccttatggactggtcctctgtaagccaagagcttcccagactgaggggttactggtatctctggctcaagcttcccagactcctaagggatatgtgtagagcagactttcaggacaaagtctgcacagtgacagcagacctttccctccctgaagggcagctgcaggggaaggcacagttgagtcagagttagctaagggaacttggagctggctgaattaggtgatcagcaaattgacaactgtcccatgacatcaacccctgtgtcccacacacaccgcaaatcagggacgtccgtggtcaagacagccccttgttgctctattcttcaggggacaatttctttaaaaacatgggcttggagtcaaaagatctgatcggaatatcacccgtgccaccatgtgccattggtcactttcttgaccccagcctcctcaagtctgcaaaatgggcataataacttactttattaataaaacaaggataataacctacttcgtaagattgttggggaatttaatgaaataatagaaaatataaactcatcccattgcctggaatgatgtatatatggtcagtacatcagtacatgaggtttccttcctctttgctagacatgttaaggttatttttattcatccttggtcaaggtttattctgacacctaatgcttctgagctgaatgccattcatggtcctaaactgacatatatatgttatgtatgtcatattacatatatgttatcccttccacattaaatgttgattttaccacttaattctcaaagtgtttgggaagaagggatcacccatgtttattatcttaggaatgatgtagttaaatttatatacacacactgcatagcccaaaaaatctcaagttaatttttttccccaaaaaatgttccattaaatgatgcagtgtcttagtcctttcctgctgccacaacaaaataccacagactaggtaacttataaacactagaaatttatttctcacagttctgcaggctgggaagtccaagatcaaggcaccagcagattcagtgtctggtgagcactggcgtgctctgcctcctagatggtggaaggcaaagggcaaggatgtaaacagctcccttgctgctcttttctaaggtcaccaatggcattcaggaaggctctgccctcattatttaatcacttctgaaaacctccacctctgagtcctatcatagtgacagttaagtttcagcatatgaattctgatactcacaatcactgatcaaatgcaggcatctctgctaagccctggggtataaagataagagcagattgctcccctccgggagctagcaacagacctcaattaaggatctagttttacagtgagcagggtcaggtgcctcctgaggcaagtgtgaatgcaaactccacttactgtttagcttcttttctcacacatgcccacaacatgggcatctggttacacatttgtcctctctcttcggccagttgtgtggcaaccttctgtgtgacttaccgagtgtggaaaggctgcctgctgcactgctcctctcacaggtgcctgtgatgccaccaatacaggttttttgggggtttttttgaggcagagtcacagtctgtcgttgcccaggctggaaagcagcggtgcgatctcagcttactgcaacctccgcctcctgggttcaagcaattctcctgcctcagcctcccaagtagctgtgattacaggcatctgccaccacaccccgctaatttttctatcaatacaggcttatatggttcccctctagaatgtagagattcctgaggcggtgccagactaggtccctaaactcacagcatgaagggcttttgagaattctttcttcctgttgggagaaagtgagaagataaaaccagaagttgcccagacgtgaaagggcagaaaaagccccagcagggattgagaaggtccctctactactatgccaccaccttacctgcttgcctctgagtttaatctttgaaaaaatttgcattgtaaggttttagaggcactggacttctggaactgcaagcccgccatttttttcagttgttgctttgatttgcttttggtcttttaatttacttattagaagttaaaccattttcttcatatattccataagtctaatccaattattgacctccatgggcttagctcctcatgcagtagaggcatataggcatgctgtcaacgaccccaaccccaaaaaagaactaaccaattgcgactgggtgtggtggctcacacctgtaatcccagcactttgagaggccaaggtgggcagatcacctgaggtcaggagttcaagacaagcctggccaacatggcaaaaccccgtctctacaaaaatacaaaaaaaaattagctgagtgtggtagtgtgcacctgtattctcagctactcgggaggctgaggcaggagaattgcttgagcctggcaacggaggttgcagtgagccatgatcgtgccactgcactccagcctggacgacaagagtgaaactccatctcaaaaaaaataataattaaaagaccagtttattttatttatttatttacttttttctttatttctgagacaaagtctcgctctgtcaccgaggctggagtgcagtgtggggtgatcctggctcactgcaacttccacctcccaagttcaagcgattctcgtgcgccaccacgcccggctaattttttgtatatttagtagagatggggttttgccatgttgactaggctggtctcaaactcctcagtcccccaaagtgctgtgattacaggcacgagccaacacacccggcctgctttatcttttttaaaaaagaagtgatggcttgtgtgtcatttaagctggagaattcaggaaccaaaatggtttgtgggcaccactgtcagtccttgatgcaccccctgagtggcctcagggtccctgaactgagaggagcacctgctacctgctccttcctattttaagtctaaaacggctattatcactgataaatgtgaaaaaaaaaaaggtggtgcccttccactgcttagtcatgttcttatttttgtctccattactagtttcaaattactccccagtatgactttgaggtcctcagaaacctggagccatggacaacttattgtgttcaagttcgagggtttcttcctgatcggaacaaagctggggaatggagtgagcctgtctgtgagcaaacaacccatgacggtaagccctgagatgcacctccgctaagcatcctaaacagctttatagacacctgccctagacatgattgcatccaactcaaattccagctcagttcagaaatctatcgccctgacattatctctcagccctgactgctcagcttcatgctaggaaggagaccacacccgcttctgaggcagctcattcactcttagatcaaaggagttgctagaaaccttttctgtctggtggagcgaggtctgcctccatgagccccccttggcagtacttattctaccatcccaggctccctaaagcaaggctcatcagtcctcccaagaccaccagcagagctcaagccctgtcacataccccaaaggtctttcctccccaggcggcacatctccagccactgccgacatgtgatgggaagcaagtgtcaggaaatctgaccacggtcctcagccagtgctgcctgattcagggccccttatatgcaggaatccaggatgtcaacacagtccttcacacaccatatggatcacttctagcttggaggaaggaacgggagaaggaaagagagaaggttcccatgggcctaaacactgcatatttatgtgcagacacattgcagttgcatgttggtgaaaactgaggcccaggtgtctgcatacaaacagcaggccttcctataatttaaagatgttggtgaagggttcagcaagctcagacaatggaaggatgaaacatggcatgcggcatgcagtttgatcaaaaagaaaaacatgtctgccggacgtggtggctcacgcctgtaatcctaacactttgagaggccgaggcgggcggatcacctgaggtcaggagtttgagaccagcctggccaaaatggcaaaaccctgtctctaccaaaaatgcaaaatttagccaggtgtggtggcgcacacctgtaatcccagctacttgggaggctgaggtgggagaatcgtttgaacccaggaggcagaggctgcagtgagctgaggtcatgccactgcactccagcctaagcaataagagtgagaccctgcctcaaaaaaaaaaaaaaaagaaaagaaaacatttcaaatagcttgcaaataccagtaatcacccatgaactgacaaaatccaaacattttacaaaacaaaagggtatgagccattgaaaacctgctttcatcaaacaccattttcattttttcttaaaacacacctatcccatttaaatcccacaagttttcaatgagagcattagaaggatcttctcccattttacaaactagaacatgaaggttcagagagtgatgcactttggatgttgccctcatccagatctcacgctgaaatgtaatccccagtgctggaggtggcgcctggtgggaggtgacgggatcatgggggcccatttctcatgaatggcttatcaccatccccttggtgctgtcctcccgagagtgagtgacttcctgagagacctggcggtttaaaagtatgtggcatcttgctctctcttgcccccacttagctttccaccatgattgggagcttctagaggcttccccagaaacagataccgctatgcttcctgtacagcctgcagattcatgagctaattcatcctcttttctttataaattacccagttttagttatttgtttatttgttttttggatggagtctcactctgttgcctaggctggagtgcagtggctcgatcttggcacaacctccgcctcctgggttcaagcaattctactgcctcagcctcctgaatagctgggattacagtgcccaccaccacacccagctaatttttttatttttagtagagagtggggtttcgccatattggccaggctggtctcgaactcctgacctcaagtgatccacccacctcagcctcccaaagtgctggggttacaggtatgagccaccatgcccagccatccagttttagttatttctttatagcagtgcaaaaacagcctaaaacagagaggttaagtaacttgcccaaatgctagtaaatgaaaaggatcaaccagaacacaggctcattcatctaagcccaggttatgtttcctgtaacttactacctatagattaattccataggtaaactgaggcaccgtgtccttgtggataaaacaggaaagagtagtctgcctcatggtgtggtcagatgaatctgaaacaagttagagaactttacacggaggatgtagattagtagattctcccacagttcacaacctatgcagagcagggtcctctctcctgccccctgtggaactctccatctggggtgagtaacaaaagcattccttgaatcatgtcaccatcacccagatgtgtccttgtttaagatgctaagatgccccagtttgagacaccaggagacccaagcactgccccagaggttcattacccaaaataaaataacagggcggggcccatggatccctgtttgaatgagtctccgggcgccaaattagagaactaccgaaatattaatggaaggatggatggatgagtaggagcctggaactttctcaagacctgggatgtcaaatcccaaggagacctcacgtgtccagctgtggtgtggactgggggccgctccagccagctcactgccgtatgaccctggaatcaccaagagcagactcacatgtttgagctgaacatgctggaagtgtgggccagacggcaccgcttctgggctccggtgcatgaaacaaacaagaaccaagaactgggataaggagtgctgaaacccgcaaggacaggagctggggagatgggaggccgcctgcgggaatgaaagcacaagagaacgagggccatggggttgggggcggcacaagtgctcaggtccttccagccgcttccctcatacagatgccacttccatccctcagacgtttaaggagtgtgcactgtgagccacgcactgtgacaagcaccatgtcgtgccagcaggtgactgcacttgctgtagctccagggtcatgtgctgtgtcagggctctttgatccctgtgtccctttaaaacgacatgatcttcatgggcagtgtttgttctcttggcccctctcagagccaaatgctgtgctcgtgagggcggtgctggttggcaggggatgggcacagagaaatcaggtggccagggcagctggaggagggacctggagccgaacaaggggagctgggaccacgagcaacccaggtgacatcctggactctgtcaaagataagcaaagcaggacgctaattaaagcagtcaaaacattttattcagtaatgactggagttgggaaaagggccgagttccatttactcagaggtgttttaaagggagaacgagggccggggcaggaggatcgcttgaacccaggagttcgagaccagcctggccaaaatagtgggacccccatctctataaaatattttaaaaattagctgggcatggtgacacatgcctgtcgtcccagctacccaggaggctgaggtgggaggatcacttgagtcctggaagtcaaggctgcagtgagctgtgtttgcactactgtactccagcctggacaacagaacaagactctatctcaaaaatgaaaataaataaaaggagaatgagggagtagaaagaaagaatgcgtggggagttgagcagaatcagggaagtgaaaaaaattttaaatcagctaaggggatgggtcagtgccgtgaggccctctgtgtctgtgaaccggtgtttatcaaggctaggcttctaccctcccacagagacagggagacagaggccctgtacttcctgatgatttcaaaagaatggctcgcagatcattgagaaaaatatccctgcgttgtgggagatacatacatgtctcaaagggacagaggaaggattcaccactataagccctttttaataaatgctctccgaaagagaggtcaaggcctcgcatcaggggctgggaagaacaaatggtaagttccttaggcagccttgggtttttccagacaggaattcaagggtgtggccttggcctgctagaagctatgctggggtttggccaagtctcttagtgcaggggtttgtttgttttggctttggttttggtttttgaggcggggtttcactctgtcgcccagtttggagtgcagtggtacaatcatagctcactatcacagcctcgacctcccaggctcaagcgaccctcccacctcagcctttcaaattgctgggactacaggtgtctgccatcatacccagctaatttttaaaaaattttttttgttgtagagaaggggtctcactatgttgcccagactggtctcaaactcctgggctcaagtgatcctcccacctcggcctcccaaagtgctggggttacaggtgtgagccaccacacctggcttagtgcaggggtttggatagagttgttcacgcagagtttctgtttttctcaatatagaacgagatggtgcctgtgtttaactcaggctcaggtgtccaggggagtatcacttgctgtgtcaaggcagaagtggtatatccagacctgggaggcccattgctacactgccagtagtaggtacagtggatcagaattcttgcttgttattcttttgatgtatgtcagcaataattccagaaaccaaactttggagaagataggaaaagggtgaaactcttcaaaaacctctgggtcctccaaccagttgctgtttctgagacgtcccccaagataaacgtacaggctctgttttcagggattgtgatggttaaaatgctcttgggatcactgtgacccgacctgtgacaagaatgtaacatgcccattacccctggcagaaacggtcccctcctggatggtggccgtcatcctcatggcctcggtcttcatggtctgcctggcactcctcggctgcttcgccttgctgtggtgcgtttacaagaagacaaagtacgccttctcccctaggaattctcttccacagcacctgaaagaggtaggtaggatggagtgagatgtggatttgaaaaccttgatcggaaagagctttcctttctagttagggctgcccaattccagacaacatgttttccaggaaaacacacacgcgcgcgcgcacacacacacacacacacacacagacacgcctcttgtgtgctggtccattctcttgtaaccatgtcaggtgaaggaacagccccgaggaaaggggcgcggggttgtccagtatccctctctgcacctagggcatcgctccttctccagccttcactgcccaaagccccaggtccctgaggagcaaaggtgatggttctagggcaggaggggaaaaacagagctcagtgtggaagaaagagaaaactggaggctaaatgccaggaaatcaccagagggagagaatgggaggaaagaaaggaacatttccagttttggaatatacgagagcgattgaaattctgggtagtgtttcctggactttaggaaggctatttgtaaaagggttaggaagaagaaacaatgcacctgactaatgataacaggactgaagaagccctaagaaatgaaactctggatagtcactgacactagagaatgaaaagattccaagcccggacccaaaggaactatctttggtctcatttcccaggaagcagactctaagatagagatttgtattcaaaaggcttgatggggaacatccttgggaataataccctaaaggagtgaaggtagccagatgtggcagagagaggttgagctgtcacacagccacaacagaggcctcagccaatcccatgtggcctctcgagctggggtggccctttagagatgtcctaagctgaggcaagagggatgggcgtgtgaactccacattggccatgcgctggatgtgggctactcccaggaaggggccctaagctagggtgagaggtgagacagcagcagccaggagctaggagcacgagtgcctcattcctgaaggcaccacagcctccattacagtcacccctgggaccacttggatctactggaagcagctcctccaggatctgagttgatctcgtttcctggggagggttacaggaggaagatgagtggaatgcactccagcccccaccgctgctgctggtgtcgggaccacaaaggaatgcttgtgggctggctccttcctccgctgccctgagggcccgctctcctctcccgggaggagcctgtgctgtaggggctgctgacctgattgggtgacccagccctcatcccagaaagcactgagcctccggtccccaagcccatctcaggcaatggcctgtccctgcacttgtcaatttgctgtcaaaatcgggcaggggagtcccaggaggtgcccagtgactctggcgggtacccactgtgatacagtggtgacttctctcttgcctgccagtctcttggcctgaggaggtggcttaaagtttatcgggccttgtttcatgtcccctggtagaaatgctcccactctgggaaccttctagaccaggtgtcagcaaactttttcttaaagggccaggtaaaaaatattttagaaggccaggcacagtggcttatgcctgtaagcctagcactttgggaggctgaagtgggtggatcacctaaggtcaggagatcgagaccatcctggctaacatggtgaaaccccgtctctactaaaaatacaaaaaattagccaggcgtggtggcgggcgcctgtagtcccagctcctcgggaggctgaggcaggagaatggcgtgaacccgggaggcggagctggcagtgagccaagatcgcgccactgcactctaacctgggcaacagagcgagactccgtctcaaaaaaaaaaaatacaaaaatacaaaaattaacccggcatgctggcgcatgcctgtaatcccagctactcgggagactgaggcaggagaatcgcttgaactcgggaggtggaagttgcagtgatccctcacaccactgcactccaccctgagcaacagagcgagactccatctcaaaatttaaaaaattttaaaatttatatatatatatttgaggttctgttggcaagaaataaaaatcaaaattatgtagtcacttatataaccacttaaatataatcatttaaaaatccgaaagccatgtgaaaaaacaagtggtaggccggatctgccccgtgggcctttgtttgctggccctgccctagacccacagagcctcaaatcacaaggccagggagcagcggtttccccagtaggtcactgggcatgatgagggtgaacagggccactcctgccctgcgcttgcttcctgacgcaggtgttccacctgctggggacacagccccacatgattgttggtcttgggtgcatgccaggggctggaggacaatgccttgccctcaccaggtgtcatctccaagctggcgcctcccctgcactttcaacaggccgctccgtccttcttccagtctggcagctgctgggtggtgcagggtgggatacgaccaggggggtcccgccttcactgtcagtgggcccattggtctggcaccatgtgatacggcgtctctactagtttgtcggggctgctgtagcaaagtagcactcgttgcgcagctgtaacaacgggaattgattctctcacggttctcgaggccagacgtccaaaatcaaggtgtcactaggatggtttccttggaggctgtgagggaggatctgtcccaggcctctaccctaacttctgagggttgctggcgatctttggcgttccttggcttctagaggcatcacccagtctctgccttgatcttcacaagccttctccctatgtgagtgtctgtgtccacattgcccctcctttatacagacaccagtcacgggaggagggctcaccctgctccactataccctcattctaacttaactgatcccctctgcagcaaccctatctccaaatacagtcacattctgaggtagagggattaggacatatgaatttcttttttttttggagacggagtctcactctgtcacccaggctggagtggagtggcatgatttcggctcagtgcaagctccgcctcctgggttcaagtgattctcctgcctcagcctcccaagtagctgggattacaggtgccctccaccacgcccggctaatttttgtgtttttagtagagacagggtttccccatgttggccaggctggtctcaaactcctgacctcaagtgatctgcccgccctggcctcccaaagtgctgggattacaggcgtgagccacagcgcctggcccagaacatgaattttgtaggaacagaattcaacacctaacaggatcctctaccaggagagaaaacacctgtgaaaccttgggaatcctgacaggccctgcaggacacgaacagcaaatcactcctaaactaaaggttagctccagccaggatgcaccactgccccttccagagtggtgcaagagtcgacgtcatcagcttgctaccaggtggctggtcagtctcctcggggaatgccgtcatatcaggggctcagcattgatctctgtcgcaggcaggttggacattccacagcagtggtggctacccagccgtgggagtgggagccccttctttcaggcccacgcgcagcctccatccctgccaccacggctgctgtgttcatgagccctgtgccatgtacaggtgaccagtggcagaggctggctgacatccactggctgtgtcatcatgtctccctggctgtctgctgtctatgatacatgctctcagtgggagttaatatgggatgcagaaatctccacgctccagctactccctcaggtccatccttcttcccaaacgtccttgtccctaaccttccagtcttccttccccagggcccctgaccaccaggcttgtcactaacccctgcctgggatcccacagctggcctgatcttgggctgcttttctttccacataaaggtgatgatcagacccacggcccaaagctctgcccgtggggacactttctccctggttggggctgaagtgcagcagcgggccactttcggtgtgtgcccacataccatgctaaccttgccatgaaaccaggccggcctttcctcctacttctgctaggcataattacccatccccctttatggtcatcatgtgagcagacacagacacggtgcgacaggggtagaggggacaggagtccgagccacctgcatgtggccaacatgcaccctctgaccccatctcaggacctactgggtctcaggcctcatgatggtcacttctgggcagcaccatcacctcgcgtccctcgtcagaagctctgtctctgccgggaccccatagcgtcccaggagctgctttttcaaacagagtacaattatctgctgcagatggccccgcctgaccccagaactctcgtatctatgttgtgactttcctcttgggatttgccataaactccacccagcatcttttcccaccccagacacttcaaggatatgcgaagtcacacattccccaggttggattcacaggccgtccctggtgggtaatgtaccagtcctgaggtgtgcatagggctgcaggctgcacggcccataccttctgcagggccctttcctgcctggggcccctccgtgccagcagcctcctgtgtggtttgataaacatattggaacagtcagtattcctaggcgtggaacatgctgcctccagaaccctgaggcctccacagcacaatgcttccttcctagtggtgggaggggcaagatacaataattggtcctttaaagaggatgtcctggcatgccccactgcaagggtcccctcaaatatcacagatgtggcaggtccctgaatctctacagggtgagtttctcaccctctgcagtgtgtgtgcctcaccaatgccttgccacttcttggcgtgtctggtcctattaatgtattgttgtgatagctaatatcaggcccttgtccccgcaccaccagtcagctgatgcaggctgcctctggcaagggcacagagccttgaccgaggcaactgccttctgggaagggcacagcctagaaagggactcagctgtgagccatttcagcctccgatattcctggaggctgggggaacaagcgcctcctccacaaaagggatctgggcaacatagcactgcatctaccctcgatggcaagtggggcacaggaccataggcaagtgtttcagagcgactagaaccccctacagagagtgccaggccgagcatggtggctcacacctataatcccagcactttgggaagccaaggctggcagatcacttgaggtctgaagttcgagaccagcctggccaacatggtgaaaccctgtctctactaaaaatacaaaaattagccacgcctgtaatcccagctactcaggaggctgaggcacaagaatctcttgaacccgggaggctgaggttgcagtgagcagagatcgcgccaccgcactccagcctgggcgacagagtgagactcgatctcaaaaaaaaaaaaaaagtaccaaggagactgcagcaccagcatgaactaagaatcctctatgagcttttgagaagccacagctgcagcaggaagaacaaagaatgagggtgggccctttgcttgggtaaaaggtgttgtgttaactgagaaccaaaaggaaacaaaattattcacctgctatttttgcttctggcttcaccatcagagaaactggtcagacaggaaagaacagacggaatgaacggtagaggggcctgctggcataagctctcacctccgaggctagaagactttgcagacttgaccgtggagccagcccctgtaagatctgagaaatcagagatgggagtggagggtgctggagaagggccaggcaactacggagcagttcgaggtcctcacatcacgactttctccagcttgactcataatgatagaatccattaaccaggatccagaggatcatttcgagttcagggagatttgctaggaatggagactttgagttaaaaaagcactagggaggttcatcctacactgatctattgagccagccaccagtttgtgtgtgtgtgtgtgtgtgcgtgtgtgtgtgtgtgtgtccaaccgggagactcagctgatactgcttccttgagatttaatacaccttcctttgatctctcctgtccccattatcccaggaaaatccagagtagcttccagtccattctcattaatccactggatccaaagtttagagaggttccccttccctccagcctccttcctggcccaacagaggagcaccccaccaccctccatcagctgctcaaaacccacaagggaaaaatccctacaggtccatgccaggaggtagtggagctaccctcaggttccattaagtcataccagaaggctgagtgtagaaatgacattaagaggggttccatctgtagggaaagggttcaagatgcaaagctttacagaaggttctccgtctaattgtgaagattaagagcactggtggacctaggaagatgaagaatggagagtgggaaaccagcagagatttcaggaaatgtataggggcatcttcatcgttcaaagcaccggagagacaaagattattagactgtggtccctgcccttaaggagccctggctacaggtgacacaaactgagaagagttggtgtctattaaaagtgagaaggcagctctgtctgatagagcatattgcaagccatgtgtgttttagatttgctagtagccacatttttaaaaagtccaaagattgggccgggtgcggtggctcacgcctgtaatcccagcattttgggaggccaaggtgggcagatcacgaggtcaggagatcgagaccatcctagctaacgctgtgaaaccctgtctctactaaaaatattagccaggcaaggtggtgggcgcctatagtcccagctactcgggaggctgaggcaggggagtggcgtgaacccgagaggtggaggttccagtgagctgagatcgcaccactgcactccagcctgggtgacagagcaagactccgtctgaaaaaaaaaaaaaaaaaaaaagtccaaagattggccgggcatggtggctcacacctgtaatcctgacactttgggaggctgagacaggttgatcacctgagatcaggagttcaagaccagcctggccagcgtggtgaaaccccatctctactaaaaatacaaaaattagccaggcatggtggcgggcacctgtagtcccagctactcaggaggctgagggaggagaatctctggaacctgggaggcaaaggttgcagtgagccaaaactgtgccactgcactccagcccagacgacagagcgagactccatctcaaaaaaaaaaaaaaaaaaatcttcgtttgtatagcagtgagtatccccacttgtaaaaaaataaaataaaaataaataataaatcaaaagatgccagaggccgtggctcacgcctgtaatcccagcactttgggaggccaaggtgggtggatcagctgaggtcaggagttcaagaccagcctggccaacatggtgaaatcccatctgtactaaaaatacaaaaattagctggcgtggtagcacatgcctgtaatctcagctacttgggaggctgaggcaggagaattgcttgaacctgagaggtggaggttgcagtgagctgagatcgtgccactgcactccagcctgggtgacagagcaagactctgtctcaaaaaaataaaataaacattaaaaataaataaataaaataaaatagattttccagccaggagttctgtgaaaaaatctttgtaaacccagaaaaagaaatggagaaaattgatcattaactgtcctctttccctccacagtttttgggccatcctcatcataacacacttctgtttttctcctttccattgtcggatgagaatgatgtttttgacaagctaagtgtcattgcagaagactctgagagcggcaagcagaatcctggtgacagctgcagcctcgggaccccgcctgggcaggggccccaaagctaggctctgagaaggaaacacactcggctgggcacagtgacgtactccatctcacatctgcctcagtgagggatcagggcagcaaacaagggccaagaccatctgagccagccccacatctagaactcccagaccctggacttagccaccagagagctacattttaaaggctgtcttggcaaaaatactccatttgggaactcactgccttataaaggctttcatgatgttttcagaagttggccactgagagtgtaattttcagccttttatatcactaaaataagatcatgttttaattgtgagaaacagggccgagcacagtggctcacgcctgtaataccagcaccttagaggtcgaggcaggcggatcacttgaggtcaggagttcaagaccagcctggccaatatggtgaaacccagtctctactaaaaatacaaaaattagctaggcatgatggcgcatgcctataatcccagctactcgagtgcctgaggcaggagaattgcatgaacccgggaggaggaggaggaggttgcagtgagccgagatagcggcactgcactccagcctgggtgacaaagtgagactccatctcaaaaaaaaaaaaaaaaaaaattgtgagaaacagaaatacttaaaatgaggaataagaatggagatgttacatctggtagatgtaacattctaccagattatggatggactgatctgaaaatcgacctcaactcaagggtggtcagctcaatgctacacagagcacggacttttggattctttgcagtactttgaatttatttttctacctatatatgttttatatgctgctggtgctccattaaagttttactctgtgttgcactatatgtgttcatgata

SEQ ID NO: 44 - DNA, 35645 bp, Homo sapiens
ccaggcacgtgcacagtgagtttgtgtaaatccagttagaccaaaatgagcgaggtggagagcctcttaaccggatgctacgggtgatgactgggaggaggagaaaaattacctctttatcttgcatgaacatcttaattttcaggtattgggcgtcaggcaaagataattaaagctatgtccatgagtcttatcccttgaggccttgtccgcttgatattttctttgcctaactcacttttaaaattttattatttttatttttttgagacagtgtcttggtccgtcgcccaggctggtgtgcagtggcgcgatctcggcttactgcaacctccgccccccgggttcaagagattctcctgcctcagcctcccgagtagctgggattacaagcatgtgccaccaagcccggctaatttttgtattttttagtagagacggggtttcaccaggttgaccaggcaggtctcgaactcctgacttaaagtgatccacccacctcagcctcccaaagtgctgggagtacaggtgggagccaccgtgcccagccctaactcacttctgaagttgctgctacttgcactgatttcagtttttttttgtttttgttttttgttttcaaggtggagtcttgctctgtggcccaggctggagtgcagtggtggtgcgatcttggctcactgcaacttccgcctcttgggttcaagtgattctcctgcctcagtttcctgagtagctgggattacaggcaggagccaccatgcccggctaaaatttttttgtatttttggtagagacggggtttcaacatgctggccaggctggtctcgaactgctgacctcaagtgatcttcccgcctcaggctcccaaagtgctgggattacagacatgagccaccacacccggcccacgatttcagtaatttctttgtgttcagtaaaactaaaaaatgactctgggctgggtgcggtggcctgtaattgcagtgatttgggaggccgaggcgggtggatcacctgagctcaggagttcgagaccagcctggccaacatggtgaaacccccgtctctactaaaaatacaaaaattagccgggcgtggtggcaggcgcttgtaatcccagctattcgggaggttaaggcaggagaatcgcttgaacccgggagaagggggttgcagtgagccgagatcacgtcattgcactccagcctgggcgacgagcaaaactcggtctcaaaaaaagaaaaatcattctgtcattctggccgctgtttgaagaatgcgaataatgcaacagggagatcagatacaagactggtaaccgaggtgtcagagttgagactcagtttcgcagattgcattggcaagtgaccaagtgggtggtgccacggttgacaaccctatttcttacatcactgagtggatgtacaaggattaaaccacactggggaagaaaagtgctcaaccctgaggcaccctcacacacctcggctcttgtgaacactagtgttcctgccgaagcacgcctacttaccccgctgagcagagcctgagcctgcaacctccagagacctggggaaagccacatactccgcttcccgcccccggcaagggcgtgtcagctacaaggggcgtgtcatctctaggccccgccccgcgctgcgtgcccacgttgcgccggcctcgcgccagtccgctgggctgcagggactgcggcgcctgagggagtcgctgacgggcacgctgactggaggctggcggacaggcgacagcgacctgcggcaggtgagctgtccgcgccctcccggggccttccttccgcccggcttctcggaccgcgctgcgtccttcgcgggccctgcctcggtccaggccttcggacctgggcttggccgggccacagccctttgggtcccctgcgccggtctgaggggagacccggccgggggcggccggaagctgggtgaggccgggcagaaggacgaagaagggcgtggaggggctgtcaggggagggcgaaaccgcggacgccgctctccagaagtcgtctccccgggggcgcggggaggcctgaatggctctctttggcgtccccgttgggcccaccctctcccagcgtcacggctatgctgggcgaggtgacccccggggtcgtagctgggggcgtcggcggtgcagacaggggatgccggcagagattggagcccggcttggctgtttcccgggctgttggcattgaccggggctctgcccttcctctaatgcccttatctctataggaagtgccccttgagtgggtgtcgtgacttcacgagtgaaccctggtacgccctggagcagagtcggactgggagggatcaagtgtgggggcagccggttagtccggacgcgggtttacctattactttctgagcgcagtgctctgggtggattaattgccctgcaaaagctgccgggacctccttgcagtctttgcacgaggcctgcctgtgtcatgccatttaaatcgcgtctgggccgggtcggtggctcacgcctgtaattccagcactttgggaggccagggcgggcggattgcttgaggtcaggagtccgagaccagcctggccaacatagtgaaaccccgtctctactaaaaatacaaaaatcagccgggcatggtaacgtgagcctgtagctccagctacttaggaggctgaggcaggagaatcgcttgaacccgggaggcagaggttgcagtgagccgagatcacgccattgcactccagcctgggcgacagagcaagactccatctaaaaaaaaaaaaaaaaaaaaaaaaaatcgcttctgatgagccggttgtcgtggcctgtggctgtccatccttacgtactgtgttttgttgatggcgctacaaaccagacaaggtggagtgtgattgaagaaagaaacgctggccggtgcagtggctcactcctgtaatcccagcactttgggaggccgaggcaggcggatcacctgaggtcaggagttcgagatcagcctggccaacatggtgaaaccccgtctctactaaaaatacaaaaaagttaaacgggcggggtggcgcgtgtctgtaatcccagctactggggagtttgaggttggaggatcacttgagcccacgaagtggagattgcagtgagctgagatcgcatcactgcactccagcctgggtgacagagtgagaccctgtctcaaaaaagaaaaaaataaattatcacaagacaaaatttgtgcttatcaggagttcacagttaagacatatataagcttacttggtgaaattagaaaaagttatcagataaaacattcaggtttaaacactggtgagggtgtgggaatttgtggagccttggaaacacactcattgaatgacctcatctacctggggatgtgaagagggaaatcctgtgattcctccattgtctgacttgatttccttttttccttggctgtggcaacatgttgaagtgctgtgagtcaccaaaagggggaacgtgagcaactctagaaatgccagtgccagtgagttacagacaataaagcattgaccgcctttagctcacccctcatcaagtctgttgaaaacttgtaaaattggacagctagagctaccttgattttttggtttccttttaacagctgactctcttcacaggacagttgggctctacatcaggattgcacccaaaactggaatatcactcctccaggaggaagatatatttgaaaattagaattgtgggcccggtgcagtggctcatgcttgtgatcccagcactttgggaggccgagatgggcggatcacctgaggtcgggagatagagaccagcctgaccaacatggaaaaaccccatctctactaagaaaaaaataataataatacaaaaattagctgggcatggtggtgtgtgcctgtaatccgagctacttgggaggccgaggcaggagaatcacttgaacctgggaggcagaggttgcgatgagccaagattgtgccactgcattccagcctgggcaacaggagcaaaactgcatctcaaaaaaaaaaaaaagaaagaaagaaaattagaattgtgtatttcactgtaaaatttgaaattcagctttaactccttggaaaggaaagagatgaaaaacttgacctagactgggtgcggtggctcacgcctgtaatcccagcactttgggagaccaaggcgggtggatcacctgaggtcaggagttcgagaccagcctggctaacattgtgaaaccccgtctctactaaaaatacaaaaattagccttgcaaaaagtagcctgtaatcccagctactcgggaggctgagcaaggagaattgcttgaacctgggaggcagaggtttcagtgagccaagatcatgccattgcactccagcctgggcgacaagagcaaaacttcatctcaaagaaaaaaaaattctatcagagtgaacaataagtaggatgctagcacatacctgtaatctcagctacttgggaggctgaggcaggaagttaatacttgatgagcctaagtttttggtgtctttggatgctgcttgtcgatctaaggggtttccaaacgcttcttttttggtaaaattgggattatgactaggaatctgttttttggagtttcccaggtgatccttgtttggggtccttgtctaaggcacaggctggaaagaggagggagtggactggcagggaagatagagcagtaagcgaatagaatacctggggaaagggacgccagaagagtgattgttgtctggtgaactgtgctgtcagtgtgtatgtcagaagccaacaaagtggatattctcttcactcagcttagggaaaaaattaatttttgtttcacagatagattcgtttccttcccaggagtattataggcctaattactgtcatagttctcagtaactttaaaaaggctgtggggaagaatggcataacagactagtatcttgtacccagcctgcctttttcttattctattttttttttttttttttttttttttttttttgagacagtcttgctctgtcacccaggctggagtgtggtggcacaatctcagctcactgcaacctccgcctcctgggttcaagcgattctccagcctcagtctcctgagtagctgggattacaggcgtatgccaccatgcctggctaatttttgtatttttagtagagatgaggtttcactatgttggccgggctggtctcctactcctgacctcaggtgatccgtccaccttggcctcccaaagtgctggggttataggcatgagtcgctgcgcccggcttttttattttttattttttatttttttgaaacagagtctggctctttcacccaggctggagtacagtgatctgatctgagctcactgcaatctctgcctctggggttcaagcagttctcctgcctcagccttccaagtaactgggactacaggcatgcaccaccatgcctggctaatttttgtacttttggtagagatggggtttcgccatgttggccacgctggtctccagctcctgacctcaagcgaaccaccctccttggcctcccaaagtgctagtattacaggcgtgagccacagcacccggccttttttttttttttttccttagagtcttgctctgtcaccagggctggagtgcagtggcgccgtctcggctcactgcaacctctgcctcctgggttcaagtgattctccttcctcagcctccctagtagctgggattacaggtgtgtgccaccacacccagttaatttttgtatttttagtagagacggggtttcaccatgctggccaggctggtctcaaactcctgacctcaagtggtccacccactttggcctcccaattagaattagaggtggagcgaccgtgcccggctaagggcctactattttttttttttttttttgagacagagtttcactcttgtcacccaggctggagtgcagtggtgtgaccttggttcactgcaacttccacctcccaggtttaagcgattctcctgcctcagcctctggagaagctgggattataggcgtctgccaccacgcctggctaattttttgtatttttagtagagacggggtttcaccatgttagtcaggctggtctcaaacttctgatgtcaggtgatccacctacctcggcctcccaaagcattgggattacaggcgtgagccaccgcgcccggccaggcctcgtatttttgcttttgctcatgttttcatgtctgagatagagggcctactattaaagcactgtgctgaggctgcaagaaggtactagtgtgattaaaacaatctggtccgggcgcggtggctcgcacctgtaatcccagcactttgggaggcggaggcgggcggatcacgaggtcaggagatcgagaccatgctggctaacacggtgaaaccccgtctctactaaaaaatacaaaaaaaattagccgggcatggtggcgggcgcctgtagtcccggctactcgggaggctgaggcaggagaatggcgggaacccgggaggcggagcttgcagtaagcagagatcgcgccactgcgctccagcctgggagacagagcgagactccgtctcaaaaaaaaaaaaaaaaagaaaaaaataaaacaatctggcattataatgccatcctgattttagttaatctagttgactggctggcctcataagtagctgtgatgatcataatttttatgcgaaacacctgtcattgagcatacaggtgtactgaaagaattgggtggaacagggtatttgaaatcagaattgttctggaaagtcgggtacataaagctctatctttagcacagttgtctgtattgcacaattaatatttatagaatggtacaccttatgttatctttttatttttccacctaactctctctctagattgaaaggtacttgacgtgcagagcaagatcttatctttctttgtagtcacagtactcaagagggtgataaatgtttgttgatgataatgtaatgtcacctgtccaagtgtagccatcatcttcagtagttacttgatctgctgttgtgtctggcaagactgctatgtgctgctgcagaggagccattgtcaccttgaactatctctgtggcagtctggaggagggcaggagggagaagggaaggaataaatgagcaaagctgagtgtggatagtagtgtttgacggcagatgaaaaagcaaacttggtgaagtgtggcctgggtggtcatctaacttctacctagaagacattaaacctttactctcttctttttatgtaggaaggcagagggaaagtcaggccttcggttggcttggtaatagcaggtatcccagtaattagaaaataacttaaaaaactccattcctctaccatatacttgagaatttgtcaatctcagcaaaattttcaaatgtctgtgttcagtgtcatatttgtcctgctctgtaagactttttgtgtttataaaaaggcaagtggacccagaaggggaaaaatatgctgttctgagaaactagctgctgtaggttatgcttttctgtctttgcttgtggctcttctggttatttgagaaaggcaaaaaaacccaaagtcttttttctactctgttcccacagtcactcaacacaacacttctgataccagatatatgggagttgtttccccatacaccaagcaattctctagtagacacaccggtgcggtgtcctctaagtcagttaaattctgatactctatctggagatagcgtcagatcccaccaattgagggctcagtcccacaaaactgtcccaacttgaggcactagtcacaagtagtaaattgtcacctatacttctgacctactagctataaatcgaaagttctgacaatccctcctcgagtttgattaatctgctagagtgggtcacagaactcaggaaaacactttacttacatttaccaatttactctaaaggatattaagaaggatacagatggctgggcgtgctggttcatgcctgtaatcccagcactttgggaggccaaggagggcagatcacctgaggtcaggagtttgagaccagcctgaccaatgtggtgaaaccccatttctagtaaaaatacaaaaaaattagccgggtgtggtcgtgcatgcctgtagtcccagccactagggaggctgaggcaggaaaatcgcttggaccctgggggcagatgttgcagtgaaatgagatcacgccaccgcactccatccagcctgggcgacagactggaagaaaaaaaaaggatacagatgaatagccagatggaagagatgtatagggtgaggcatgtaggaagaggcatgaagcttctacgccctctctggaactttcgtgtattcagctatcctgaagctaatgcaaaccctggtgtgtgtgtgtgtgtgtgtgtgtgtgtgtgtgtgtgtgtgtgtgtgtgtgtgtgtgtgtgtgtttatggaggcttcattacaaaggcataattgaatacgttattggccactggtgatcaactcaacctttagaccttctcccgtcccctgaggttaagggggtagggctgaaagttcccaccctctaatcacatggttggttccccaggcaatcagcccccatctaggagcccaccaagagttacttacttacaacaaaagatgctcctattacccaggaaattccaagggatttaggaaattacaaaagttttaggagctctgtgtcaggaactgaggttaaagaccaatatcagaatgaaggattctcctagtgcccccatctacaaaggttttaggagctctgtgccaggaacctagggtgcagatcaaatatatctataaatctttttgtttgtttgtgttttgagacagagtcttgctgcgacacccaggctggagtgcaatggcgctatctcggctcactgcaacctccgcttcccggattcaagcgattctcctgcctcagcctcccgagtaggtgggactacaggtgtgcgccactatacctggttaatttttgtatttttagtagagacggggtttcaccatattaaccaggctggtcttgaactcctgacctcaagtgatctgcccacctcagcctcctgaagtgctgggattacaggcatgagccgctgcatccagcctcaaatttatctctgtatcttcttctaaattacagtatcacacccgtgcatatgcccaaaaatttttttttttttttttttgagacggagtcttgctctgtcgcccaggctggagtgcagtggtgcgatctcggctcactgcaggctccgcctcccaggttcacgccattctcctgcctcagcctcccgagtagctgggactacaggctcccgccaccatgcccggctaattttttgtatttttagtagagacggggtttcaccgtgttagccaagatggtctcaatctcctgacctcatgatccacccaccttggcctcccaaagtgctgggattacaggcgtgagccactgcacccggcctcatatgcccaaattttaaaggaggcaccacattcaagtccaaatgcctaaaggtagaaggatcaagaaacagtagtatgaggccatttgagaagtatatatagttatccctcagtatctgtggagattagttccaggacccctcaagggtaccaagatccaggatgctcaagtttcttttcttttcttttttttttttttttttgagacggagtcttgcactgtcacccaggctggagtgcagtggtacgatttcggctcactgcaatctccacctcccgggttcaaatgattctcctgcctcagcctcccgagtagctgggattacaggtgtgcaccaccacgcctggctgatttttgtatttttagtagaggtgaggtttcaccatattggccaggctggtctcgaactcctgacttcaggtgagccgcctgccgcgggctcccaaagtgctggtattacaggcatgagccactgtgcccagcttaagtttcttatataaaatggtgtatagaatttgcatataacctatgcatatcttctgtattctttaaatcatctgtatttataatacccaatacagtgctatgtaaatagttgttatactgtatcgtttaggtaatcatgacaagaaaaaaaatctgtacatgtgtagtacatatgtagccatctgttgttttttttttccctgaagattgattggttgattgagacggcatctcactctgtcaccgaggctggagtgcagtggcgcagtcttggctcactgcaacctccacctcctgggttcaagcgattctcttgccttagcctcccgagtagctgggattacaggtgcctgccacaacccccggctaatttttatatttttagcagattccgggtttcaccatgttggccaggctgatctcgaactcctgaccttaagtgattcacccacctccacgtcccaaagtgctatgattacaggggtgagccaccatgtcaggcctttttctgaatatttttaatctgaggttggttgaatccactgatgcagagcccatggatatggagggctgactgtactgtattgagcttctaaggtatgcagagtattggcactgaggggatgtgcaaatacaacaacaaaccaagcatagtctttgtttactaggagctggtagtaactgtgggaagacacaaaacagtaaaatcactttgtaaggtttatgagagttttgagaggccagggaagttaaagagtggagaaatggagaaaatgggagaacttgtactgaacccattaggacagaggaggaagggaagagaaggaaggaggccaaagaaagaagaaacccttcttagagcactcagggtcttactgaaaactttacccataaaaagagaatgtcactgatagactccttttagaacagggattgatttttttgtttttgtttttgtttttatttttgtttttgtttttgagagaagtctcgctcttgtcccccaggcttgagtgcaatggcttgatctcggctcactgcaacctctgcctcccgggttcaaacaattctcctacctctgcctcccaggtagctgggattaaggcacctgccaccacgcccggctaatttttgcatttttagtagagacaaggtttcaccatgttggccaggctggtctcgaactcctgacctcaggtgatccacccacctcagcctcccaaagtgctgggattacaggcttgagccaccatgcctggccacaggcaacatttttaaaccatacgattgtcctggagagagaatctgaagccttgctctgattctgaaagggatttgcaaccaaaaaaggataaggattgttctgacaagtaccctttcttcccatcttcaaaagtacacatctcttaatttgtgtcttcaaacacaaattgtgttcaaaaaaggaagtatttgagtagattaaagacagaaaccctaggacattcctttgtaaacaaacagccttttaccaaacaccaactgtcaagggacttgcctgagtacttgtccaaaggacagcgtgtccccatgtgtaggcagtggtctaatctggttcctaggagaggactgctgaggccacagcaacttaactggctagtgtgggtgaggcagaagtgtttgaagctcaaggtctgtcaaggacagctgattagagtatgtctgtccctaatacagggttagagctcagtaccaatgctggggatgaggtgagttgaagacacagaaactacatggttttttggaaggtcacgaacttttcaaggaactagtgggcaactggaaatgatatgtgaaagagtagagggagctctggcctagctgccagaaaactctgggcaggtcaggtctgggaacagtggctaatccaggcccagcttcccactgttgatttggacatacaggcctaagataagagaccgtgcccagagccactggtcacttagcacaggtagtgggaaatggtagccagcaaatgtttaattgaatatcttatgtctcctagaccacagctgagcaaactaggccaagctcaaggtcctgaggggaatgaggagctgagctcagtcccttttggccccctttctctttccctcctcattttaagtatggaagctcacttatttcctttttgtattggccatttgtgtagggttttgtttgaaaaagggcttgaggctgggcgtggtggcccacgcctgtaatcccagtactttgggaggccaaagaaagattgcttgagcccaggagttcgagaccaacctgggcaacatagtgagaccctgtctctacaaaaaaatttttaaaattagctagacatggtagtgaatgcctgtagtctcagctgctcgagaggctaagttggaagtatcacctgagcccaggagttgaggctgcagtgagctctgattgacccagtgcacttcagcttgagcaacacagcaagaccctgtctcaaaaaaaaaaaagaagttgggcacagtggctcaggcctgtaatcccagcactttgggaagcctaggtgggcggatcacctgagatcaggagtttgagaccagcctgacctctaaaactacaaaattagccaggcgtagcccagcggctcatacctgtaatcccggcactttgggaggccgaggcgggcggatcacctgaggttgggagtttgagaccagcctgaccaacatggagaaaccccatgtctactaaaaatataaaattgctgggcgcagtggctcacacctgtaatcccagcacgttgggaggccgaggcgggtggatcacaaggtcaggagatcgagaccatcctgtgaatggcgaaaccccgtctccactaaaaatacaaaaaattagctgggcgtggtggctggcgcctgtagtcccagctccttgggaggctgaggtgggagaatggcgtgaacccgggaggcggaggttgcagtgagctgagaacaccagcctgggagacagagcgagactccgtctcaaaaaaaaaaaaaattagccgggcgcggtggcatatgcctgtaatcccagctactcgggaggcagaggcaggagaactgcttgaacccgggaggcggaggttgcggcgaggggagatcacgccattgcatgccagccttggcaacaagagcgaaactctgtctcaaaaaaaaaaaaaaaaaaaaatgtagccgggtgtggttttgcatgcctgtaatcctagctactcaggaggctgaggcaggagaatcacttgaacccgggaggcagaggttgcagtgagctcagaccgtgccattgcactccattgtttcgctgcaacgagagggaaactccatctcaaaaaaaaaaaaaaaaaaaacaggcttgagtatacctctcacagccctggagaatgcctgagctgttggacagttgccttttccattatgtctgcttttttctaaagctattcattcattgttgcctaatcatgtcctcagtcagtagttgatgttctgggctatttgaatttcctctgaataatgattaatggagataatgatgtttgaccagttctgggaactcttgggaattaaaggaattaaactcttggacattaaacttcactttaatgtgtatagttgtgggtgctgccccattggagaagattgtgacaggaagttacacagttttacagcaaactgctgggattttttatttttttttcagtaaattatgataactgtagcattttcctttgcaataatgataacctaaggccttggtgtttcctctaaaatgtacatagatacaggatgtgggtttgttacaaagttgtataactattgcctttttgtggctgaccccttccctagagaacaacatgaagagaccttgctgctgctatgaaacccagactctaaggacaacttgggggacattggatattttttcacagatgtagacatcaaggagtcagtggtttgtgtatgcgttgagtggagaaggctggcaagcatttgctaccatgactgttaaaaatgtgcctgtacatttctttttttttttttttttgagacaggatctcactctgtcacccaggctggagtgcagtggtgtgtttttggctcagtacaacctccaccattgtgggctcaagcaatcctcctgcctaggactcctgagtagctgggatgacaggcatgtgccaccacgcccagctaatttttgtagtttttttgtagagacagggtttttgccttgttgcccaggctggtatacatttctttatataaggagggggcaagtaacacagtgttatgctaccaatcaggctttcagagaccataaaacaaaatctaaaaggtacgctcttagtagtcatatctgtggaatgtaaggaagccagtttaagaccaatgtaatgcagcattttcccttcacacatgaaacagtgagttactcgagcacaaagcatcaaatgcttattccccccacaaggccattcttatctttcaccaagtgtttagtcactaggcagccatcatcctccctccctctctcccttcctcccttactttcttcctttcttccttttgcagtggcacagtcatgggctcaagtgatccgcctcagcctcgcgagtagctgggaccacaagcactcaccaccacatccagctagttttattttatttttaaaaattttttgaaacagagtcctgctgtgtcacataggctggagtgcagtggcacggtcttggctcactgcagccgccacccccagggtcaagtgatactcctacctcagcctcccaggtagctgggactacaggcatgtgccaccatgcttggctaagttttgtattttttgtagagatggggtttcaccatgttgcccaggctggtctggaactcctgtactcaagctatccacctgccttggcctcccaaggcgctgggattacaggtgtgagccattgcgccgagcctcatccagctaattttataatttttggggggaggtagcaacagagatctccatatgttacccaggctggtctgaaactcctggcctcagtgatcctcctgcctcagcctcccaaagtgttgggattacaggcgtgagccaccgcgcccagcccattattcttatatctgagattcacctttaattgccctctgtcatcagcactttgagaatgcctcaattttgagaataccttgtattctggaaatcattcattcagtcaacaaaccctgactggtgtgtaattgggcagtaggaggccaagataaatgacctgtaatctggaaaacaaacatataaacatacacataccataacgagatatgagtgctaggatggatcacaaaaggcttacttaggtagctctgaatataatatcaggcctacaatattatcacttatgttgttttttggatcttatttttagaaacagcacaagctttttcttggaggaaatatagcaaggaagaggggagctgttctgactgaagcagggtatgggaggcccacagcctttcctgctttgcctcctgttcaaagccatcctccctgcagttcactgagaaatgactccttggagctccaaggaagtcctacagctagctagtagcagacctggtagtagaagttagttcttctgattcttagctttcttagcagtcaggtaccagactgataaacgaaaatcaaatttctcccagttatatgttccatcccacaaagaagtaataaacacatttctgtcaggggcttcagcctgcctggatttgttactgggtttgttttaaatgtttagcttccaggcatccaaatacatacaaaaaaggtctattcccaggaacatactgtaacccttttcattgtcatttgtgggcagtgccaagctgcctctaatagcttcttctgtttttttggtggaaattcagtttcctcagaaatctatataagggatatttgataaaggtgactaacaatctcgtctctgtaaattgatgaagggatgagaggggtattagactcatgtcctcttttgaatgcacactgcttttgtggtccggcagggtttctcagcgttagtgctgttgacattttgggctagattgtttgtggtggtggggtatgtgtgtgtgtgtgtgcgtgcgtgcaagcacatttgtgcgctataggacattgagtagtatccctgacctctacccactattgtcagtagcacactcccgtctttcagttgtgacaactaaatatgtctgcaaacatttccacgtctccaaacatgttccttgggggacaagttggcccccagtggagaaacactggattggagattggttgtcatgtgataaaaatgcaaatcagatttgtcacaggacaaagtaaattttcagttacctaattaaacctttactttttataagtcgctctaaagaaacaaaagtgtgtcctgtcttccatcctgattctcggttactggagggcccttcacctaagtcatgttcaggatctccttgaaggagttaaactaaaacaatacaatatcttcccttaggtcttttgcagaatttattttgctaggccgggcactatggcccactcctgtaatcctggcactttgggaggccaaggcggctggatcacttgagttcaggagttcaacactcgcctgggcaacatggtgaaaccccatctctacaaaaaataccaaaaaattagctgggcatggtgttgcatgcctgtagtcccaggtacttggggggctgaggtgggaggatcacttgagctcaggaggtcaaggctgcagtgggccgagattatgccactgcgctccagcctgggtgacaaagtgagactctgtctcaaaaaatatatatattttgctagaaatcccaagatttttctctcttttctttttgtttattttctttctttttttgagatggaatctcactctgtcactcaggctggagtgctgtggcatgatctcggctcactgcaacctccacctcccaggttctgagaagctaggactataggcgcatgccatcacatctggctagtttttgtatttttagtagacgcagggttttaccatatttgccaggctggtctcgagctcctgaccttgtgattcacctgccttggcctcccaaagtactgagattacaggtgtgagccactgtgcctaacccccatatactttcaaacaaaaaatggaaatatcactgtctccatgaaaagccatacaggcagcatcaaaactacactaggggccaggtgtggtgcctcctgactgtaatcccaacaatgggagggtgataggattccttgaggctaggagttcgagaccagcctgggcaatatagtgagaccctatgtctacaaaatactttttaaaattagcatagtggtgcgcacatgtagtcctagctacttggaaggatgaattgggaggatcgcctgatcccaggaggtagagactgcagtgagctaatatctcaccactgcactccagacacagtaaaaccctgtctctaaaaaaaaaaaattaaataaataaataaatggtttacactgagggtcacagactttgagttgaggttcgtcatgaagaatctccattttcattctaatagcactagatacaggctgggtgtggtggctcacagctataatcccagcactttgggaggccgaggtgggcagatcacgaggtcaagagatcgagaccatcctggcgaacatgctgaaaccccatctctactaaaaatacaaaaaattagctggatgtggtggcacgtgcctgtaatccctactactcgggagtctgaggcaggaaaatcccttgaacccaggaggcagagattgcggtgatccaagatcacgccactgcactccagcctggcgacagagtgagactctgtctcaaaaacaaaacaacaacaacaacaaaaaacacaaaaaaggctgggcacagtggctcaccttgtaattccaacactttgggaggccgaggcgggcggatcacttgaggtcagcagtttgagaccagcctgggcaacatgggaataccctggctctactaaaaatacaaaaattaattgggtgtgttggcacatgcctgtagccccagctactcagaaggctgaggcacaggaattgcttgaacccaggagtggggagaaaaaggaaatattaggggacatttgttaagtttatatttttttcttttctcttctttttcctctttttttgagacagagtctcgctctgtggcccaggctggaagctggaattcagtagttcagtcatagctcactgccgcctttacctcctaggctcaagtgatcttcccacctaagcctcctaagtggatgtgaccacaactgcatgccactccctccacccccgtctgcctaccagctaattcaaaaaaatttttttttgtagagatggggtctccctgtgttgcccaggtcagtctcaaactcctaggctcaagcaatcctcctgccttggcttctcaaagtgctgggattacagacatgagccactgggctcagccattaattttaaattgcaagtgacatattctttagtttattaatcagcaccatatgatgtcacagttttataactcatttatctcatttaattctcatacccaccttgtggaattgttatcactgtcctttacagatgaagaaagaaactccaagaaattaagtagctggcccaagtccacccaactgggatgggcagaaccagggtttgctcttggttgtgcctttctacagcctgtgccttaaccacatctatgtgctgcctcttggcctctgtgtggccagtagattctctcatggctaggctcatcttaattaacatttgttgggtgcctactatggctcaggctctagagatcattgtaaaatccagtccactgccccagctcctcgtgtgtcttttgaacacattagtattgtgctgtgcagaaaggacttctgtgcatatgcctgctattacacttgttgaacccaatttctacaaactttcattcagatggagggattcagtcttcttatcatataatacatacagaaatacaaatatttaaatatttatctaaattaatagtcacatatgccatttatacagttagtgagttacagccaagtgacagttgtgatgggaggctgtgtctggggagttacatactggtgaggaaactagaaaacatggctgtcgggccggcactgtggctcacgcctgtaatcccagcactttgggaggccgaggcgggtggatcacgaggtcaggagatcgagaccatcctggctaacacggtgaaaccccgtatctactaaaaatacaaaaaattagcggggcgtggtggtgggcgcctgtagtctcagctactcaggaggctgaggcaggagaatggcatgaacccgggaggtggagcttgcagtgagccgagatagcaccactgcactccagtctgggcgacagagtgagactctgccacaaaaaaaaaaaaaaagaaaacaaggctatgaaaatttaacacattgactgggcagggtaatgcatggtgatctgttttctcttcgctccaatcctgaaaggtttctttgaagagctggagtgtctagaaagctttcctagaaagctagtgtacattttgctaagtaatcactgtgtcacttagattttctgctctttaagtgtggttatgagatgtgttccaaacaatttgttactaaccatgaagttgatgaatgctttgcctttaaaaaaataagtttgggtggggtgcagtggctcatgcttgtattcccagcattttgggaggctgaggcaggcagatcgcttgagtccaggagtttgagaccagcctggacaacatggtgaaaccctgtctttactaaaaatacaaaaattagccaggtgtggtggcgtgtgcctgtagtcccagctgctttgggggctgaagcaggaggatcacttgagcctgggaaatccaggctgcagtgagctatgatcacaccactgcactccagcctgcgtgaaaaagtgagactgtctaaaaaaaaaaagtttggccaggcatggtggttcatacctgtaatcacagcactttgggaggccaaagtgggaggattgttgaggctaggaggtcaagaccagtctcggtttgattgggttaaacattatccctgtaagttggctctcattctgagaagttgtttagagtagaagagagggctgcatttacagctaattgctagtaatttcacatcatctgcaatatattttctggacactctgcccgactagtcctatgggacgttgtcattcatgtgcaaatcaggccctatatactaagggaggaaaacagttgaggacctcctttttttaggcactcttggtgccttgtgcattaagatagtgagtcagaggataagaaggaagcagattccattccccttaccactctttgggtgtaggcagggcctgctggtagtgctgggaaagccgaccatccttctttgagcaagtccaatagctgctgctgctagttctgtcccaccataggcacagtctatgtaggatgagccaaccatatgtggagttactggttcttggtctgggcttgttcctttccccaatttcagtccccaccagaatctgggcagtcattgtgaagaagcctaggaataataccttactctataggcctgtggaaacgtgtaaagataccttgcaggcccagagtgagaaattggagccaccttgttcgattgaccaaaggcttgtcctatggagttactaattttacaggaagtttatgttaacatactttctatccattgcactaccatttctgaggcacaatatatttcagtaggcagaaagatagaactgcttagattttaaatactcaatacatgcttgacacagtttagtctatttctcttcagttactatggcagtgggtgctatagagatgtgcagaccctattgtgacctccctttggtatagggatgctctggagcccctggcttcattgtccactaaggtctggcaggtctgattgcctcttttcaggcactgagtggtggggtatgccatcctcccctgctggaaccagccttggcctgccctgttagtcatcaaaaatagatctcaccagggaacaatcttctcaggttgttgtgtaatttgagtgagccaaggtgagtgttttagggacaagcagcatcaacttcggaatcttcaactgggcctgagcacttatttctcagaaataatagaatcttgctcacttttctttctttttttttttttttttagatggagtctcgctctgttgcccaggctggagtgcagtggatcagtctagctcattgcagcctccacctcctgggttcaagagattctcctgcctcagcctcctgtgtagctgggattacaggtgtgcgccaccacgcctggctaataattctatttttagtagagttggggtctcaccatgttggccaggctgctctcgaactcctgacctcaagtgatctgcccgcctcggcctcccaaagagctgggattataggtgtgagtcaccatgcctggcctcttgctcacttttcatactaaaacaacaaattacaggctgtagtttaacctctctactgcatgcataaatgcagtgtggtacgagtgcctctgtagcccataacttcagtttccttgttgctagcagtctgtggtgacactatactaatctcacatgcaggaaccaatgaggattagccagggacacaggaggagtcaccttgcattcagaatgactcaagtttagtctcaacttgaccattagctctctgagtgatcttgcccatgttaattctcttgatcttagtttcttcagagccagtgagacattgcttgaaagtgacttagcctggtatacccaggtctgtcagacttatagtctggtgctctcttgggtgaacttgagggccttctgccaaggcaggaatggcttcttttaaaaaaaaattattttattattatttttttttttgtagagacggggggtctcactatgtttcctaggctggtctcaaactcctggactcaagtgatccttcagcctcggcctcccaaagtacagagattataggtgtgagctaccagtaccagcctccaggaatggcttctaaggcttcaggctgtttatagagaggaaagcacctgggagctgatggcactctcaggtttcccaaaatgacagttctgcatatgcatcttaatcacctactttttttccctccacccccaaatgctattcacagtccttgtttatgatagaagctgaagcttacaggtgacaatttttgtgcctgtatgaaaggaaacatgactgactccacttatccacacgacacctgctttcaaggttgttcagtgttggaataatttttgcttgatggtaacctagggatgacccaaggtttcattagttaaagccagccctgtgggatgcatgaagtctagcctctgtccctgtaaaaatcccaccagaaccattttagaattcactcaggacttcacccctcccgctcctggtgctgcttatggaactaaagaatcctcatcttctcagccctgggacacattgtcctcatataaagcgaggtggcaatcagggaacaggggcgagtcttgtgcttatttcagttataataggaaggctctaccaggactcatcattgtcccaacaatagtcgattccaggccccttctttgaactcatttcagtgtctcaggttctgtccttggtgtctgtcttcactgcttgctcagttgtatttgaacatggctagagatgagcacacttctcttctccagtaaaaaagcctgcaagaaaagtcttggacttcttgaactgctattcagttgtcttttttattcaatgtattttttgagatggagggggtctcactttgttgcccaggatggtgttgaactcctggccacaagtgatccttctgcctcagagttccaaagtgcagagattacaggcttgagctaccacaaccggtctcttgtcagtttttgaggttacttaagaggttaatgcctttaaattagtttgcagttgttttgcttttgcctgccttcttgcccaaatgcgcaagtgcttatttagtaatctgactcaagtgctttgtgtccccagagtccccacttttccaggattcattgtctttttttttttttttttttttttgagacacagtcttgctctgttgtgcaggctggagcgcagtggcactgtcggctcactgcaacctccacctcctaggttccagaaattctcgtgcctcagcctcccaagtatttgggattagagtcacacaccaccacacctggctaatttttttatatttttagtagagatggggttttgccatgttggccaggctggtcttgaatgcctgacctcaggtgatctacccgctcggcctcccaaagtgctgggattacagacatgagccaccacacccggctggattcagtcttaacttgctctttttttttttttgcatctcactcccttgccaggctggagtgcaacggtgtgatcatagttcactgcatccttgaactcctggggtcaaaagatcctcttgccccagtttcccgagtggttgggactacaggtgtgtgtcaccacgcctggctaattattttatttttcgtagagacaaggtctgactgtgttgcccaggctagtcttgagctcctaggcttaggtgatcctcccaccttggcctcccaaagtgtcaggattataggtgtgagccactgcacccagcctggatttgctcttttatcaagaggttaatatttattcttccgttcagtgaaccgtgggattgaattcccccagcgattgaaatgaaagggcttatgtataacatttcctgaggaatggtagtaccagagttcagaggagacctcaggccatttattctataaactcagaagctgtagttctagatgatgtggcttcttcagggtgttgagaagtctctgttatctcgtgccttgttggattagaactgattgagctctgtctgctgccccaaacatgtggctcagccaatctccagtggcatctgcaatgtgggtattctagcctccagtgctcacgtggctcaccttagaaagggcagatattcctatttcctgacgctgctggagaatgaggtctgagtcagaagtcctcaggtgtgacctgcccagaactatctgaaattgctggatttcttgttcttcctcagtgtttaacaatcacccaattgctcattctcaccagcgacttcctcagtaagagctcaatatttgaggtggtgctgcattttgtcaaacattcatgcgtgttagcccacttagtcttcgcagcacacagtggattaatggatttttaaaagctggtatttatgcacgatggaatactactcaaccataaacaagaaggaaattctgtcatttgtgactacatggatgcatctagaggacattatgctaagtgaagtaagccaaagaaagaaagacaaatggtgcatgatatcacttatatgtgaaatctgaaaaagtcagttatagaaggagagtgtaacatgttggttaccagcggctgggggaagggaagggtgggtgtggaaaggggagatgttgatcaaagggtacaaaatttcagttaggagaaataaggtctgatgatctgccttacagcatggtgactatagttaatatggttaatattataatagtattgtatacttcaaaattggtaaaagagtggattttaaaagttgtcaccacaaagaaatgataagcatgtgagctgatggatatgttaataaccctgatttaattattccccaatgtatacatgtgtccaaacatcacactgtaccccataaatataattgtcagttaaaaacttaggagtcaagtcagatctgaagagaagtcaaaacagatttcatacagttaatttagagacatgggacccaattaaaaatttgtattactttacttggtattttagaatttagctgttattttcttgttacacacacaggcacaggcacacaaatcctctatttaactggctttctcagtaggaactccatctgtgtatttgcaacagctgtaactcaggttggatgctccccagggtgctggcctataagtcatattggaccctgatctgaatctgagggaatctggatctctcttgtaggaagcttttggtttaactgggaagacaggatgacagtcagttgtggaagctgaagcgtaatcacctcatattaatatggtggcaattttatatcggagtgagctctgagctgcaaacagccttctaggaagcaggcaggggacccccatccagggtgatggtaagaatcctgatgcccaactgcaaggtgttcagcagggagggagcactcgtggagtcccagtgcagaagtctctgagcagccacttagcctccctgtgtttgtggggtaacaacccgagttcatgttgtgggcatctcatgcagtgtagtagctggtcactgtcaagtgtcactatttcattgagtcagaagcctgcagaattgttctcattccagggagtgagtcagtctgctgttgcttactctcggtgctggctgagctcagcaacctgctctcttccttcagttcaggtttctccagggcaaagaagtctttattgttcctttctgtatgaccagatgggaaatgaattataatatagtccttagattatattcccacctggtagcaatgcactgagttacctgacctgaaatttgttggacttagtctccatggaggaggatttaccatcttcgttgtctcagaagtcctggtagtgcctcatgccagcaatttagcaggagcaaaagctttgagacagtgttctggatctgctgagctggtctaaaggaacctcttttgcttgaagtaactgtgataggaactttgttactgcttctgttagctcaggtgttggaatgagaatcagcagctgatgaggtgaacagctaggagtactggaattatggagtagtggaggtagattttataaacagagggtcccagttttttggaaatgggaaagagagagggtagactggcctttctagaatttgtaacagaaaagaggacccaggagcttccattgactagttagttaatgcagtgcgggatcttagctggtttgcttggtccaattcctgtctctcggtttcttttttcccttcccttcgctgccttcccctccctcttccctttttctttccaagagaattgagtcactccatataaaagaagcagccagttggctaaaaagtccaacaaaaaacaagtatttatagctctccaaatttcccacttgtcattatcagtatacttttgcacacagttatagtcggtgtttgggatcctttttaaaaaaataaaaagtttctgtaggcttttccatgcatgaacacagcttatcaacttgccccggctgtgccaggattccattgttgactgttgtttgagcagtcatgccctttgttcttaggctgtgtgttgtttttttcctaacatcatagtatggctgggtattattttgatacagattacaattactattactatttcttgaagtgtatttcccagagtggaatattttaggatctttttttctcttttgtgggggtggggaacatgtagcttcttgtggatattagacattgaagtctaaaaaggttctatatttatgatttggccctcaattttctagagattccaatggttcctgcaaagaaaagagcattcaagtatagaaaccagccagactaagtctggacatgtagcttttcagaaagtgaaaaaaaattatgtttctgcagttgcaaggtggcctctgaatgccacactgtgtggccactcccttggacagtggctaggccacagggtcgcctcccctggccccagtctgtgggttgaatatgctaaccgagccttcccaggagcctcctctgcccccagcccccaggtctgtacagatggtagttggtactttcagcccgccttgagaactcagtattcttcctgttagctttccttcaaagtaaaatcggtagaacctattttgagtgtagaaaatttgaagtcgtggacagcagattacaaaaaattgcccaccaccatgcctggctcatttttgtatttctagtagagatgggctttcaccatgttggccaggctggtctcgaactgctgacctcaggtgatctgcccacctcggcctccctaaatgctgggattataggtgcgaaccactgtgcctggctcctttttgtatttttcggagaagcacaaggacttgttgtttaattaagcaagactatactctcccagagcatgcagttattattgagtaaaacacagttaatgagatttaatcacgttccctatcactgttgtgcagcatgataagtaggtgcaaatggcaagaagcacgctgaagttactgcagttggtaacctgggccatggatggcacttgtctttgcctcattttgcctgtaagaagcatggggcctgtggtcctggggtacctggaccctcagcctggtgtgtgtgtgccctcagcctggtcctttacttccatcacccatctagaggctccaggaccctttactgcacccctccctcctctagatagctcagtgttttcatcccagcacctttttctctgctgcctgagaactgagcagccagagacaaattttggctctcagggtcctcaagggtgtacagcaaagctgttcttattatttaaagtattttatttatttatttttgagacagagtcttactttgtcggccaggctggagtgcagtggcatgatctcgactcactgcaacctctgtctcccaggctcaagaaatcctcctacatcagcctcccaagtagctgggattacaggctggagtgcagtggctccatctcggctcactgcaacctccgcctcccaggttcaagcgattctcctgcctcagcctcctgagtagctgggattacaggtgtgtgccaccatgcctggctaatttttgtatttttagtagagacagggttttaccatgttggccaggccggtctcggactcctgacctcctgatctgcccacctcggcctcccaaagtgttgggattacaggcgtgagccaccgcgcccggctagcaaagctgtacttttaccaaaaaaaaaaaagaaaacatttataaatcaaggtctgaaggcccatgtgaggcttattctacagcttgcaatgcctgtttttgccccttggtaagtggacgcacagctgggcagccttatgctatctctgtgaactacccatttctggctttgttcataatattcccttgatctggaggccctcccccagccctgccccaaatcctgtctgtgttgagggtcctgccccaggaagccctctgcatactcttccctgcatgtaatacctgcctgctttcacattcttctagactgtgctgtgcatcgtacagttcatcagcattattgcagagtagagtgtctctgatttggagtcaagagaaggttccatttttctgtacatcccgatgtttattttctgagtgttctcagacatcactaagcctcagtcaaaataaagtatgatcatgatgtaacattcattgagtgcttatcacatggtaggcattgtgctatatgagttattgcttgacttcctaaaataatcccagtagagatgctaaatctaaaggtgagagagatggttcaaaaagacctcagtgagcaaaccatgtactataatatcctaaaagataacaaaaatgtaactaggtatctagagaaaactcaggaaggatatgtgccttgggccttttaaggaccatttcttaacacttctgtgttcttcttgacacctgtttctgggtagagcacatagaaaatgctcagtaaataagttctttttccttggcccagtttggcctgatttggccccagttctgtctttgtgagttactttattagttgtcggtgctactgtgctgctattcatgtggaagattccccaaatgggctgcgccttacattgcctgagcagaagccccgagggatggaggatgagcttgccttgttatgggactgtgtttccctggctgacaaaggctcagcatttgcagcaggcaatgggaattgattggccaacttaatatttccttcagcctagcaaagtcctgagtaggctagggacagtctgcttttttggtaactcctgtaggctgccttctgcacaaggcacccagcctctcacaggtaggatgaactggcctcagcacgcttgcagaggggtggaactgtgcgttgcttgccaagctttttgtttccctaaggtttttgaggttttctttgtttttggtaactttcaattttttttttttttttttttttttggacagagtttcactcttattgcccaggctggagtgcagtggcgcgatcttggctcactgcaacttctgcttcgtaggttcaagtgattctcctgcctcagcctcctgagtagctgggattacaggcacgcgccaccacatccggctaattttgcatttttagtagaaacagggtttctccatgttggtcaggctggtcttaaactcctaacctcaggtgatccacccaccttggcctcccaaagtggtgggattacaggcatgagccaccgtgtctggcctaacttttaattttgatacggtcttttttttttttttttttttttttttaagacagtttcgctcttgttgcccaggctggagtgcaacggcgtgatctcggctcactgcaacctctgcctcctgggctcaagagattctcctgcctgagcctcccgagtagctgggattacaagtgtgcaccaccatgcccggctattttttgtatttttagtagagacagggtttcaccatgttaaccaggctagtctcaaactccagtctgcctcggcctcccaaagtgctgggattacaggcatgagccactgtgccctgccttgatacagttttaagcatacagaaaaatggtaagaatagtacaaagaactctcatacctcttccccagattcactgctaggattttgccttgtttgcttttctgacttgccagtgtcccccaccctgcagcatatgcacatgcacacacactgtcttctgaaccatctgacagggagttgcaggcagtgtacctttacttctgaataccccagtgtgtatttcttaggaacaaagacattctcttatataatcgcagtacaattatttttaaaaaccagcaagcttaatgtcaatacaatgctattacctaatacattgttcatattcagattttttccatattccactatggtcccagtaatggcagagctttattttaaagaaaacaatcctggggtgtgtgggtgtcaccttggttacattcgctctgaggaaagcagaaccgacaggtatttggggaagtgactgccgtgggtgccacatcaccagctccttgtgtctctgcaggaccagaggagcgagagcagcaagaaccacacccagcagcaatgtcagcggaagtggaaacctcagagggggtagacgagtcagaaaaaaagaactctggggccctagaaaaggagaaccaaatgaggtgagcgatgggggctggctgcactgaatcaggtgggcccagcacctgtcgtgctcagcacacctggttttgtctgttggcagcactggggagtggccatgggccatgagctctggacccctgggtgcctgcttggccctgcagggaccgcatacagcttcggctgcttagaactctccccactggtccattgtctcatccaaggaggcagggcaggtgctcctgggagtgctgataggatttgatggtagttatccttttttctttttaaaaacttgtgcgtttcctcatctgggctgagaaagggtaaacgcaggcaaagctggctctgttcagtcttttaccacataaaagactgcagggcagcctttccttactctgtatagggacagctcatgctaaacctgagcttccaggccctgttctgcatcattagcctctcatagccctgtcattggccaagttttttttttatcccttgaaataattgctaataataaattgattctcagcacatggatgataacgagctaatctcctaaagaagacagcagaagccagaccatgataaggccaaatttttctcactcttgtagatggattgtgtggacacatgtaagcccctgcccaagtaccaccatctttaggatcacatgttttctaccttgtccatccatccacacacctttacaactgtgtaatttcgttaagcagcacaaacccagcgtcctggccctagcctctcggttgtctcctttgcatccttccgtgcttggtcctagtcacatatagtctcaaagaagctgtgggtccaaggtgggaggaaggcagtagggccatctgaggagacccatggtcacagccttactgaggtgtgtgaattccagaagacacgttccaaggcaggctgttcttagagaagccagcaaatactgaagggaatacagatgtgtgtctcttcgaccactaggtggccacagaagcaaagcattgctcatttgggtggttcccaacacagacacatggacgtgggtactactctcaaggagcaggccacagttatcccttgtgtcctgagtccttggagcagaatgtcatgtctgcttgtcctgtgttccctgacaagttgctgctatttgtgttggagtgaagtgtctgagaagccccagcctccagtacaacaggtggtcaccttggggtgtggactcaatcttctctctatggtcctttctggaaagctgggaagggctaattgacacacaaacacctcccatctctccacagaatggctgacctctcggagctcctgaaggaagggaccaaggaagcacacgaccgggcagaaaacacccagtttgtcaaggacttcttgaaaggcaacattaagaaggagctgtttaaggtttgtgccccgcattgggttccagactgtcatatggggttggggtgggggccttggtcccatgagaaaagtgcccctggagccactctgagggaaaagctgggcttttctccacactccattccttcttgacgttaagctctggctctcggctgggtacagtggctcatgtctgtaatcccagcactttgggaggccgaggcaggtggatcacttgaggccaggagtttgagaccagcctggccaacatggtgaaaccctgtctctactaagaatacaaaaattagccgggtgtggtggcgcgtgcctgtactcccagctacttgggaggctgaggtgggagagtcacttgaacctgggaggcggaggttacagtgagccgagatcgtcccactgtactccagcctgggtgacagagcgagactctttaccccgccaaaaaaaaaaaaaattggttctcatggcttagatagaataacatagtggtgtgaaggaagcaaaagtatgcgtgttccaaagacttcaccatgccattcctttaagaaacaaaagcttccttgtgtgttaaataattcactacataaaaatggaccataggattgggtctttggggttgggggttgtcacttgagcctctgcatccagctgctcggatgtggtgtgctcaggcatagctggcctcctcctgtcacctccacagctggccaccacggcactttacttcacatactcagccctcgaggaggaaatggagcgcaacaaggaccatccagcctttgcccctttgtacttccccatggagctgcaccggaaggaggcgctgaccaaggacatggagtatttctttggtgaaaactgggaggagcaggtgcagtgccccaaggctgcccagaagtacgtggagcggatccactacatagggcagaacgagccggagctactggtggcccatgcatacacccgctacatgggggatctctcggggggccaggtgctgaagaaggtggcccagcgagcactgaaactccccagcacaggggaagggacccagttctacctgtttgagaatgtggacaatgcccagcagttcaagcagctctaccgggccaggatgaacgccctggacctgaacatgaagaccaaagagaggatcgtggaggaggccaacaaggcttttgagtataacatgcaggtactattgggggctgccagctgctagggctgaagagggaaactttgacagtggtagcagatccatagtggcccatgaaggcacacatggcattaggacagatgagctgcagggtgccgagaggaaggtggccaccagattggccaccagagcttgtgggcccagtgggtggttcccagcatggaggcctggtgtgatagatgccagtgggtagtgttttgggaagggtgagtcctctcgcacatagaggggtctggaagaatggagctggcttcctccctcattgcaggatgctggtcttgaagaatggttaattttcttttcaagttttgctctgagaagccctgctttataagttaatagagagccagtgccaccaaggagagtaaataagctctgtttacaagtagcctttagatgaggctgaacctggggaagcttactctgtccccaggtcctgtcagcttccactgaggcctcccagggcactcaggatgagtatgccctgccacagtctcattctcccatgttccaggttttctgttgcttcttgataaaaaaataaccagcacctagaaatggggatgtactcatgccctcctgtctgtgctgtggtagtttcagtggcttgagccacctcagagaaggctacatctctggtcagttcccaggggagacccagcatttggcagccttcttggggtaccaatatccacacctccccagagctcttgctagggagggaagaccatcaggcagtgcagctgccgcccaccagtgctgcttgctgtgtagttggcacacctgagcaagctcacctgctccagctcactctctctggagggcgtcctctaaaaggagagtgtagccaggcgcagtagctcatgcctgtaatcccagcactttgggaggctgaggcaggggcattacttgaccccaggagttgaagaccagcctgggcaaccaaggtgagacaccatctccccacaaaatttaaaaattagccaggtatggtggtacacacacgtaggaggataaggtgggaggaccacttgagcctaggagtttgaggctgcagtgagttagccatgttcataacactgcactctagcctgggcaacagagacctcatctcaaaagacatttaaaaaaaaaaaaaaagtatgggcagcccaaagatggctcagtcgatcctctgctcctgcagatattcaatgaactggaccaggccggctccacactggccagagagaccttggaggatgggttccctgtacacgatgggaaaggagacatgcgtaaatgccctttctacgctgctgaacaagacaaaggtaggtctgtgtgtcctgagctcccctcctggggcaggtgtagcaggagactccactgatgccatgtctcctattggtgctgccacacaggtgccctggagggcagcagctgtcccttccgaacagctatggctgtgctgaggaagcccagcctccagttcatcctggccgctggtgtggccctagctgctggactcttggcctggtactacatgtgaagcacccatcatgccacaccggtaccctcctcccgactgaccactggcctacccctttctccagccctgactaaactaccacctcaggtgactttttaaaaaatgctgggtttaagaaaggcaaccaataaaagccagatgctagagcctctgcctgacagcatcctctctatgggccatattccgcactgggcacaggccgtcaccctgggagcagtcggcacagtgcagcaagcctggcccccgacccagctctactccaggcttccacacttctgggccctaggctgcttccggtagtccctgtttttgcagtacatgggtgactatctcccctgttggaggtgagtggcctgtaagtccaagctgtgcgagggggccttgctggatgctgctgtacaacttctgggcctctcttggaccctgggagtgagggtgggtgtgggtggaagcctcagaggccttgggagctcatccctctcacccagaatccctctaaccccttgggtgcggtttgctcagccccagcttatctcctcctccgcgctgtgtaaatgctccagcactcaataaagtgggctttgcaagcta

SEQ ID NO: 45 - DNA, 64258 bp, Homo sapiens
ggcggtcccctgttctccccgctcaggtgcggcgctgtggcaggaagccaccccctcggtcggccggtgcgcggggctgttgcgccatccgctccggctttcgtaaccgcaccctgggacggcccagagacgctccagcgcgagttcctcaaatgttttcctgcgttgccaggaccgtccgccgctctgagtcatgtgcgagtgggaagtcgcactgacactgagccgggccagagggagaggagccgagcgcggcgcggggccgagggactcgcagtgtgtgtagagagccgggctcctgcggatgggggctgcccccggggcctgagcccgcctgcccgcccaccgccccgccccgcccctgccacccctgccgcccggttcccattagcctgtccgcctctgcgggaccatggagtggtagccgaggaggaagcatgctggccgtcggctgcgcgctgctggctgccctgctggccgcgccgggagcggcgctggccccaaggcgctgccctgcgcagggtaagggcttcgggcgcacctggagggctggggcagctagcggctgggggaaaccgccttggtcaccgcagtctgtgggaggctggagggaggaaaggaggtgcgacggatccccttttctgtggctgccttgaggccccgcgggtacctagctgtgtggtcgcgggtagtggctcttgcgccccctgctgcgcttgctcccttggtccggagcgctccccggaatgcccggtgaagctgtgcgggaaccctgcggtctgtgtacaggactgtgtccttgcaaacctgactctcgagcttccttcccagtgcccccaggagcctttacacaaccgcgtcccaggttactctaaggggagactgcccgagagggcgcgccccagcggggtgatgtacccgcctggggagtcctttgtaccagcgcccctcttctccctctgcattgggggtccacctcgcctggtcctccccccacccccgcgggtgcatgtgtggatgacagtgccctgactatgaagggactgacatcacgggcgctgagtcacggatcttcccgctgcacggagtcactttggcagccaccaactctgggaagccaagtgccccagtcctgggaattgagtcgggaggctggcaagggagtgagacctcctggggctggcacgtgctggactcccctctagaaaagagaaggacccgtgagggagagggcagaggcacttactgctcccgttgactgtaatctgcccctggcaaaccaggcttttcttgggctctggccgcatgcccagctgcgtgtctagtctctcttctggaagagttgggcaactggctctccagaggtttattttagggtcccagtgcttctttgaggacacagcagaaaactaaggggcagctgacaggcttctggaacagctgacaggctggggaggctgaaggctaagactttcaaccactagatcacactgaattccagtcctaggtgaacactgatctctccctttgaggaggtgactttctgcaactagaggctgagctggagtgtctgaggctctctttgctttttggatggttgtggtccttatgattggaagaaaaaaagaagggattccattttcaatacacatttataactcctgccagtaacagacactgttgattggggcacccattcaatgttttctaatcctccactgtatctacatataactttgtttgaaagaggagactgaggttcagggaggttgggatggcgggatggcaggttgtcaggccccggtgatggaggccaacccctcccgtggctctgtgctccagtgtggtagatgtctaagactctcaaatatagaactagatcagcaggcagagctgggggcattggggcaagctgagagtcactcttgtctggctgagtgctgggacagaaaaggctgagggagggaagtggaggcccaggcttgcccatggtggtgttagagggatgcaagacaggttccagggctcggatggcctcaggagcaagcagggctcccttggctgcctctgctgctgtcacgccagcccaaggctcctgccccagggaggttactgttactgctgtagttgccaccacctgttgctcctgagtggatgctaggcccttccagggcagccagttacagtcagttttccatttccctggtgctcaggaaggattaggagaggtggtctcatggcctgaacagcccatgaaaggcagaactgagagactggggaggaagtgaaagtcctcccagctcagaaggaaaatgcagagaagtagaaatacccagcccctctcccacacccacacagactcagcccacaaactggagagtaaaaataaagaaatcgtacaggaagcatggagcaaatgactgtgagatgtttcgctttagagaagtgaggagcagagggggagcagaggctggagttggctgagaggggaaatccgcaggtacagcctgcggggctcttagagcccagaggtttgttttcctcgggatcagctgccgcccacacaccctggagctgccaggacttctcaggtgtactcgttgtctaagggcctggactagctgggacttaggcttctgccggttccaacactctggtgctggaaggctggacttgggtgactcaagttccctcttcctactgcaatgcaagaaaatacacaaaagaagtatgtatacctttaagtatctcaaagagctatctcagcttctgaatttccttctagggcacctcttcctgcccccattacccacacacgtgcctagcctcaccctaaatcagtatttctcaaaagcttagttctgagcctagcatcagatctggtgtgtgtgctgggtgggagggctttggtaaacatgatgatttttgaaccctaacccagatttattaaataagaacacctaggagtgaggcctggggcatgtccttttaaacaaactgccccttgtgattcttaggcactgtcaggtttgaggacggctgcctaaatggtgtcattgaggaactgaatgaaggccctcccgcttcgggctctctgttgccagaaatctctccttgctttggcttgctgcttgtttattcattgcagcaaacatttcttgagtcggtgtagagcctgtgaggcctgtgtaggatcagctatgcagactccaccctaaaaggagcctgaaaatggtcatgggtaaatcctgagaagggctgagaaaccccagactctgaccgggccactgggtaccaactacccgtgaacagattgtctggcttggggtagggggtggttagagagaggaagttcctctgactgaggaccaagatcccaaggcagcaggcacactgatcctgaccctgaccctcatctccagccctcagcagccagggtaaacaaatactcccctcactgggtatttgtagattacacaaagtaacctaggtgctgactgctgaaaatatacactcccttcccccgtctcctgaatcctggtcccaccaggcctggaagccacagacccagcaagcaaaagagtttccagtcaatgaatctagtctggattgaagctgtgctctgtaatacggtagccactagccacgtgtacctatttaaatttaaattatgccagcgcagtgactcacgcctgtaatcccagtactttgggaggctgaggcaggaggatctcttgagctcaggagttggagaccagcctgggcaacagggtgagatgccgtctctacaaaaagatttaaaaaattagctgggcacagtgacatgagcctgtagtccctgctactgagaaggctgaggtgggagaatcacttgagtccagtctgcatggagccatgtttgcactaccgaattccagtctgggcgacaggagaccctgtctccaaaaaattaatttaaatgaaatcaaataaaaacttagtttcttagttgcactagtcacattttaagtgctcaacactcacattgctagtggctactgtactgaacagtgcagatacagatctcttccatcatcgtggaaagccctactggacggtgctgggctagagtgttaaccagtttcttccagaggttttctgttctcttttcctttatccccctctgccttctgctctcctccacctgaacacagctcattttgcataggtgatggctaaggtcttcaagccaggcacatctctgccctgcactgccaagtaaaaatgataacaccttgggcaagtgatttaacttctttgacagccagtgttctagaaaatagaaataattgtattacctcgaagggtggttatgaagatgagatgagctaagtaaggtattaaatagagtgtttacagaagtccctaacacacagcaagtgcttaaataagtgtaggtgatcattcattcactccaaaaatatatttttggagtgaacacctcctactctgttccaggcactattctaagagctggagatacaccatgaataaaagagacaaaaaccccaggcttagttgagtttcattctagtgtgggagactattaacaggatgtaaattaagtatgtggtatgctagcgactagtgctaaggagaaaaactaaagccgagagggagacagaccccatgtgtgtttgtggcagggtggggtggcatggtgccttggatgggaggccagggaatgccttgctgagaacataatatttgagtgaagacctgaagaaaatatacaaatctctagagattccctatatgtccatcttgggcaggaaaattcttgcctcctctttaacaatgtgtactacctgagggtgtgttatgttctggagcagagggctctgtggggacacatggatgctccctgccctggagaagtatctctggggtaacaagtcctcagccctttagctccttgaagtctagcagagggaagtgctaaatgccaggtcataactgcaagtctgcaggtgggatccttgagggctggagtggcaaggggaaggtgacaaagaaaaggccttttttttttttttaaatacaggatcttactcccgtagcccaggttggagtgcagtggcacaatcactgctcactgcagcctcgacttcctggtctcaggtgatcctcccacctcagcttccggaatagctgggactacaggcgtgcaccaccacatctggctaattttttgtatttcttgtagagacaggatttcgccatgttgcaggctgctctggaacacctaggctcaagcagttcacccgccttggcctcccaaagtgctgggattacaggcgtgagcctttgtgtccagctgggaggtttttttgtgtagttaatctgtgttctttaccctctcctcttgcctgggatctgaagaggtcaaaagtccctggcaaaggcagaggcttttctgccactgggttcaggcttgacgttagctggacctcagcagcctcccccactcctgctcatcccttgccagctctgtcgggtgctttctactcttaggagtatgtccctgaggccctgcatccagcctattctccccagcacctgttctctgaatcagttcccactccacttcccaaccgctttcccgaaaagcatcctttggtcttccctctctatatgatggttacaataactgttaccatttatggtgtgtcaactgtgtgcaagtagctgtgctaggcccttggcatctgtgatctcatgtaatcttcaaaacagcctcaggtgagagaagtgctggccccattgcatagatggtgggctgtaggacaagatgagaggccagttttgcacatatggaaacaaatgtcttttgttttcgtttttgttttgagacagagtctctgtctcccaggctggagtgcagtggtgcaatcttggctcactgcaacctctgcctcccgggttcaagcgattctcctgcctctgcctccagagtagctggcattacgggtgcacaccaccacacctggctaatttttgtatttttagtagagatggggtttcaccaggttgccagtctggtctcgaactcctgacctcaagtgatctgcctgcctcggcctcccaaagtgctataggattgcaggcatgagccaccgcgcctggccgcaacgagacaatcaagagaagatgctgataaggagttggatatgggagtcaggaatttgggaatgaggactgagcttgagatgtaaatgtgggagtcgtgtgctggcagatattatttcaagccctgagagtggctgaggtcccccacatctattcatatgcctttggtcagtggaatgttttgcaatccacatcactataaatgaatttcctctgtctctgagagaggccgctgaggtagcagagagaaaacagctttgagggcaggcagtccaggcctgtctccccattaactgcttcaccagctaggggacctttgggcaagtcactacaagctttaaagtataaaatactttttgaggccggatgtggtgtatcatgtctgtcatcccagtgctttaggaggccaaggcaggaggatcacttgagcccaggagttcgaggctgcagtgaaccgtgacagcaacactgcactccaacctgggtgacaaagcaagaccctgtctcaacaacaacaacaacaaaagtataaaatactgtaacagacaaaaatgcatgcttgataaatgttattgatcctaagagccttttttttttttttttttgagatggagtcttgctctgtcgcccaggctggagtgcagtggcgcgatctcagctcactgcaacatccgcctcccaggttcacgcagttctcctgcctcagcctcccgagtagctgggactacaggcatccgccacgacgcctggctaattttttgtatttttagtagagacggggtttcactgtgtcagccaggagagtcttgatctcctgaccttgtgatctgcccacctcgtcctctcaaagtgctgggattacaggtgtgagccaccgtgcccggtgagccttttttttttgtttttgttttgagacagagtctcactgtgttgcccaggctggagtgcagtggcacaatctcagctcactgcaacctctgcctcccaggttcaagcaattctcctgcctcagcctcctggcctcagctgggattactggtgcctgccaccacacccggctaatttttttgtatttttagtagagacggggtttcaccatgttggccaggctggtctcgaactcctgacctcaggtgatccacccaccttggcctcccaaagtgctgggattacagacgtgagctaccgcgcccggcctttaaaagcctattttgatgggaggagggggatgctataatgtgaggactttctcccagaaaaggagagagaggcactaatgcagtggggataataattaaaatcgcttaacattttttttgaaagattaggtatgttctgaaaatagtgctgaggtttttgcattaattatctaatgtaatcctgacaacatttgaagtacctatggttattatttctattttatggatgagaaaagtgaggcctagagaggttgagaaacaagcccaaagtcacacagctagtgagtgactgagatagggttggaacttgggtatatctgaatcctgggcttgacctgtagacccctgctcctgtggactaggaaatttaaacaaagaacttcctctttttttttttttttgtatttcattatatggatgtactgagtttatttatctggttccccccctttttttttttgagacagagtcttgctctgtcgctcagacttgagtgcagtggcacgatgttggctcactgcaacctctgcctcccgggttcaagcaattctcctgcctcagcctcccgagtagctgggattacaggcatgcaccaccaagccaggctaatttttgtatttttagtagagatggggtttcaccatgttggccaggctggtctcaaactcctgacctcgtgatccacccaccttggcctcccaaagtgctgggattacaggcatgggccactgtgtccggccacccggttaccttttgatggatgtttagttgttcccttcttgctcttacggcccctgctgtggggaataactttgcatatgcctcttgttgtgtgagtgcaagtacacctgcaggatatattccccgaaggggaattgatgggcaaaggccatgagatttgtcatcgtgagacagaatagaagttgcaccaatttatacttccagcagcattgtgagaatgcttgtgtccctatgcccttgccaaaagtgtactattaacctggtatctacacagacaatggcgtctgtgtggaattaatttgcatttatcttatctgaataagattgtatgggttttttaatgtataactgacatttgcataatctactatgacctgcctgttcatattcaatgctaattttattttgattgggtcattaatcttattgtttacaggagctcttgacatattaacatgtcatacatgacttttttttttttttttttggtggtgggggtggtttttgccaagaaatttctttttttccatctctctctctctctctctttctttctcagggtctcacggtgtcacccaggctggagtgcagtgacatgctcatggctcactgcagcctcaatttcctgggactcaagcgatcctcctgtctcagacttctgagtatgaggctcagactcaaaagattggggcttttacaggtgcacaccaccacacttgactagcctttgtattttttgtagagacgggattttgccatgttgctcagactggtctcaaactctgggttcaagcgatcctccctccttggcctcccaaagtgctgggattacaggtgtgagccactgcgcctggctgcaaatttttttttccaactagttgaatttaccagtctcttttatagcttctaggttttgtgtcatacttaataacatccttcccattccaatattttatttttatttattttttgagagaatgtcaatccacctttattggaggaaaccttgcactgtaactgttttaaataatgtgtgccctgccccaccctgtgcctggtgggctcagaagatcatctccagctgccgggcatactcggtgacctgtttggccagttctgtggagggaatggtagtgtcttctggctcctgctgctggccggcaaaactatattagttgttggggcccgggacccaccctcacttcttggtgtagtcggtcatctttttgggtgtgttgaagaagaggatctggtggcctcggtaaaagggattttctcataggctttcttgatgcacccggccatctcatccctgatagtgtcaagcaggatgtcgatgaagacggtgtagctcttggcgaggatgttacccttggccaggaacactttgttgtagctgccctccattaggtattgctccagggacacagggtttttggtgtagacattggtctggatgtccttggcaggcagccactccagctccatgtggaactcagccacccgcttctgggacagcaggaagaggagattgaggcccaagagctggtgcatgtaggctgactggggaagctgttccttgtaatcaaagtagcagcatttgagctgggtcatgtggcgctggaaggaggggatgtcctcgcataggatgctccactggccccgatcttcagtatgtcacgggccagaatgagctgctgtttggtcagcttggtccctgtggttggcaagaagttgagctccagaagaactagcttgaggcagcccagctcttccctgcacttgctaagattggggcttttacggttccactcgcccttgagttgcttgtacttgccgtcctcagcctgcaggacagggccctaggtcgccaggggcccggagctcaaggcgccggctgcactgttcacctccacccccattccaatattttaaaagattctccttttctggtattgttaaaagttttaaaagtttaaatatttgatccattttgaatttattaatattatggatgaggtatgaagtctgactccagctttttctttccagttgtcacctgacatctctttacagtttattgaattcatctttcccccaccaattttcaaagttacattttaaatctaccaaattcctgtatacttgggtttatacgcctcttggcatagcgagtagttaaaagcacaaattctgaggcccaattgtctggacttgaatgcaggtcacccctaattagctatataacctcagtctcttcttctgtcaaatagactattgagaagatcaagttagttaatctatgtagcacacttagaaactgcctgtatgtgtagcaagcacttagactaagttatttttttaatgtggtaaaaacacataatataaaatgtatcagccgggtgcagtggctcacacctgtaatcccagcactttgggaggccgaggcaggtggatcatttgaggtcaggagtttgaaaccagcatgaccaacatggtgaaaccccatctctactaaaaatacaaaaagtagccagctgtggtgacaggcacctgtaatcccagctactccggaggctgaggcaagaggggaggcagaggttgcagtgagccacgattgtgccactgcactccagcctgggcgacaagagtaagactccatctcaaaaaaaaataaaataaaataaccattttaaagtatacagatcagtagtgcagactaaactattttttatttttattagttctgaactttctagtctcttccataatttggtctccctattcatgtgccagtatcgcactgttttaattatgtagttttattttttccttcctatttttttagaggaagggtctcactctgttgccaaggctggagtgcagtgtcttgatcatagctcactgcaaccttgaactcctggactcacgcaatcctcttgccttggctttctgagtagccaggaccacaggtgcatgacaccatgactggctaatttaaaaaaaaatttttttttttttttttgtagagatggagttttgctatgttgcctaggctggtcttgagctcctggtctcaagagatcctcccgcctcagcctcccaaagtgttggcattacaggcatgagccactgcacctggccaagtaaactttagagattaattagggaacactgatgtatttttaatgccgagtcttcctatctcttggtaggcctgatggggcttatgatgagggaggaggagctggggcaggagagcccgacattcaggtctcactgaggggagatgtgcccaggacacttccactggaactgcttccttgatggtgatgtggagtgagctggaccagtgtgtgcgtgcatgtgtctacccaagctcatggcacatgggggagcggagggggtggggatggctcagcagtgattggaatgcaagagtggggactttggggcctgtatgaaaaagtgttatggcagagtgacacacctacgaaagagtgtggtcagcataggcctcacactgggtgggtttttacaaactgaacacatgcatggaaccaccattcagaataagaactgaacagaagcatcctcaggggagccctgaaatccccctatgcacacccctcaaacctccccttatccctcccagctgctccatccacacctccacgtgacttcttaaatcttcagctttgctgcctcatagctaagggggtcagggaggggaagctggggggtctgtagatatggaatgggggtgcgtacatcaggtccctccctctccctgccctcctgccaccttccagaagcacataaaaaaaatctgactgagggccagcctctttgttatactctgagactgtgctcagagatagaagacaagacccctaggccatgcttctgggaaggcagagggctgcgtgttaagcctggaccgagagtcccagagcccagctccggtcctgacaccatgcactgctgtgtgacttctgggccctggttctcctcatccaccaaaatgagcaggttggcctgagtcgtccttaagagtcctgtatagccttaaaacagcgctccttatctcagcaccctacacactggctgtagcttctcctcactgtccctttcaggaccaaaatactgggtgtatccatctgcaggtaccaatggctttcttctaaggccctgctgcgtcctgcttttaatctctttatttctctatctgctcctggggttaggtttgggccagggagtggattgtttgccctccttagatatcctttctttttttgagacagggttgcccagggtggagtgcagtggtgcgatctcggctcactgcaaactccatctccggggttcaagtgattctcctacctcagcctcccgagtagctgggattacaggcatgcaccactatgcccagctaatttttttttttttttttttttgagatggagtttcactcttgttgcccaggctggagtgcagtggcatgatctcagctcactgcaaccttccggtttcaagcgattctcctgcctcagcctcccaagtagctgggattacaggcacccgccaccatacccggctaatttttgtatttttagtagagacaggatttcaccatgttggccaagctgatctcaaactcctgaccttgtgatccgaccttctctgtctcccaaagtgctgggattacaggcgtgagccacttcacccggcctaatttttgtattttttggtatggatggggtttcaccattttggctaggctggtcttgaactcctgatctcaggtgatccgccagcctcagcctcccaaagtgctgagattacaggcgtgagctgccgcacatggccttagatatcttttcctctaattagtttataatctctgagagttgacccaggttgtaccttcttggactggagccaggtggttatctctgatgctgccagaggaggattagatgttttatctcctgagttggtcacacgcgcacgtgggtctctgagtcagcattgagcattacctgtttatgggtccaaaggagcctccctcccagaccctctctccagcagtgtacagtccatcgtgtggatgggaggaaggcaaggccaaggtaaatactgactcagacaaatacaagcaggtacaagaagtacaaatacatatgtgggggaggagggagcaggggcctgccagccaaagctagtcatctgagaagagggggttgcggacaggtggggctgggagctgagtcagagaaggttgctgggcctcccattagagcctgggagccttgacttgccgtagcctgcggccttgcctcttcctggacagtggccgagggtgccctctgaaatgttaaggagaaatgaatgggcccagatggtggggtgacttggggaggacgcgagatttggagtccaaggggaggcagttttaggctctaactcatcctatacacgctgcggctgtgggggaagggagagaaaggccaagggcacgactcctggctcctgagagtccccagtgccccattaggttggcagctgcagtgatggcgctgacccccccttgtgcacacccctcaagcctcagcattcccttccctgggcctctgaagggtggaaagatgtgagaagagcagggaagaggagaggaaattgggagagggggagagagagggtggtggggagcccagagaagggagctgggggtggagcatggagaggtacctgggccaagtagagagaggctttggccaggctcatctgggtccagcgtggattccctcatgcatgagctgtgtgaatttgggcaagttccctaacttctctgatctcttgttgcctcaacaatgaaatggggacaagacttcctccctggcagactttttgtgagtagtgtgctcttagggaaagcccagggcgcagggtaagtgtcccagttgctaatgattgttatggttattatcacatcaaagccaggagccagtctcagtccaaagatggagaatgcaagaacaggtgaccaagagcactgggacttgtcctagccctcgtgggaccaaattctatacttgtttccatgtggacacaaggtgtccacaggcttctcctggaggcttctcagcacccacctacttttagatcaagaccattattgctgacaggggacctttgtttcctctgtagccccttctgaaatcctatgcctttgcaacccaagaagctgggttaggctgggggcctcctgtgctgccagctggcctgggcagcggggacctgcgtctctgctcagaaactggggtggtgagatgggattagcaggcacgagccaagcctgtgtcctcggtggcaggccaggcagctggttcaccgcttacataaacggggccaggaagctgaacttgtttttgctggcaagagctgcggcaagctgcaagagagttgagaaatatgtgtctccgtgtgcgtgtttttctctggttattgacatttgcaagtttacttgaagagggggaaaaagtagaaaaacaacaaagctgtttggattcctggcacccaaacttaggtcccaactggggaggaaccccactttcccagagctgtgctgcagggtccccagaccaaagggtgtctgggccatggtgggggtcccagtgtccctgggagggggaatcctaggccaccggggcagggagatatgggcttgcttgttgggagttactaggacctaaactctctttcccttgaggaatgggaggcaagggaggttgtgggaattttccctcccctagagctctccagggagaaagaagcatttttctgagggcactgggatgatctggtcatcatccttctcccaaagccatcaactattaaataataaatccatagattcattatgtgttttcaagctgagtattgtttgcttcctgccctctgagagctaatgattgggcgccatgggatgctagaccgcaggagtgggggcctgtgggggatctacaggtcacagtctgaatcctcatttcacagagaaggccagtgggctctgccaggggcggtgacgtgcccatggctgcctgtgagtcatcacaagaccaggaatagaactcaggtcacctgacagcacagagctgtttcctctacaccaaggggcctcctgcttgtggagatgtactttattttattttatttatttatttatttatttatttattttcaagaaggagtctcgcccaggctggagtgcagtggtgcaatctcagctcactgcagccttcgactcactgcagcctctgcctcccggattcaagcgattctcatgcctcagcctcctgagtagctgggattacaggcacacaccaccaagcctggctaatttttgtatttttaatagagacagggtttcaccatgttggccaggctggtctcgaactcctgacctcaagtgatccacccgtctcagcctcccaaagtgctgagattacaggcgtgagccactgcaccctactgagatgtactttatattaaagaacaaatcaaggcagactgtacgtttgtgtcagcccaaccccacacaattaatagtcagtgattaaactgaccagaccagaccagacaccaacactgactgttgaggaggagcttgggggtttgttttcgggaggcaatactgcctccttttgtgatcttagtcccaggtgaggtgcttccttgtcctctctgcagaatcccattctttcttagcctgggctgaagctgctccctccctgtatgtgaccctggccttggcgcagtccttgggtgctcttcctccctcctgcctctgcgctgcttcatgatgcacaggagccaaggaggggcaggggacagtcggttttttctcagggagattggaagagaacagaaacaagaagcaatggaatgctcctgtcctggaggttggtggggcagtggggagaggtggggaagccattgagcctgcacatacttttgacaggcttggctcatgcctgccaaccccatcccaccgcctgggtttctgagcagggacatgggtccccactgcccaggccagctggcagcacaggatggcctccaacctaacccaggctcttgggttgcaaaggcatagcatttcagaaggggccacagaggaaccaaaagtccccctgcctgtggagtcaggcctgatctctttgagggtgctcacaccctccatgttcccctgtaggtcttccttccctccttactgcatttcagatactccagacaccagccctccccagaactctcactgttttttgtttttttgagacacagtcttgctctgggtcccaggctggagtgcagtggcacaatcacagctcacttcagacttgacctcctgggctcaagtgatccttctgccacagcctcccagatagctgggaccgcagacatgtgtcaccatgcccagctaattttagagttttttggtagagatggagttttgccgtgttgcccaggctggtctcagccacctgggcacaaacgatcctcccatctcagcctcccaatgtgctgggatgacaggcgtaagccacgatgcctggtgactctcaattcttttttttttaattattattattattattttggagatagagtttcacttttgtggcccaggctggagtgcaatggtgcaatctcagttcactgcaatctctgcctcctgggttcaagtgattctcctgcctcagcctcctgagtagctgggattacaggtgtgtgccaccacgcccggctaattttgtatttttagtatggggtttctccatgttggtcaggctgctctcaaactcccgacctcaggtgatctgcccgcctcggcctcccacagtgctgggattacaggcgtgagccacggcgcctggtgactcagttcttaatgccttgcatatactgttctctctttatggaatgtaactccctgtggctccacttatcaaacccccactcatttatcaaggccccaataaaatctctcttccccctttagaataattgatccctcttcttagttccctcagtatgttggagacatttatatcaggttggcctgtattacagatagttttaagttctagggctttgtggggtttaaagaagattacgatatggaaatgataggaaggagtgccagtgcattgtagatgctcagtagcttcaatatggagttttttttttcctggattaggaacttctgaacttgcacatcatgggtgcacaaaaattattgaattcttgaagaagggacaggcataggcttgcaatcctggctctgaatgctgagcaattgctcacggacaaatgctccgttgattgtgtgctctttgctaaatttcagtgtgtgcaccagccacgccttcgcccccgcgtgccccgtctcctagggcctactatgcaaggcctgtgtcaggccggggtgggagcatgagaatgactgggcatatctcccaggaccaggaaggactgctctcaggagccccctcctcacctggttcctcatcgtgtctcttccttttggcccttctctttggtagggcctacttagggagggccccagcagattcccagggaacagaaaaacagacagatgggaggaatcaaggctgagcccagggatggtgtcttgtgtccaccagggaatcaggcctacaggggagggctgggctatgggtgcagaattcagtgacagtgacagtgagagaactcagcagtgcaagggcaaagtggcactgtttggcctgaaggtgctcggaagctgcttgtattgaaaaatccaccctcatcccccgacatccctcagtgcccactgcgctctgccgtgccctctccctccttcctagaaatcctaactcacacagacccaggctatgtagcttgtttaattaaatatatatatatatatatatatatgtattcattataagagcaatataggcaacttatagaaaattcaaaaactacagaaagacacagggaagagaaagaaatcacctctaacaccatcatttggagaggagggcagaggtagggagaggacacttctatgaatgttacttgttctgagagtcacccatgaggcttccccactgccacccagctgtcaggggtactgagtcagagatttgggtcaggaggcagagggctgagtgggtgggagggaaggggcggtgctgcccactctgactttagcaagtatgttttcttatagtctttatgagtatttctttgatcattctgcatacagtgcttttaaaagcgtagttaacacagtgttgttcgcaggttctagaggaaatatattttgaagcagggctgtgacaggcaatacttgccaatgggtggtttataattaatcattccctgttttaaaaaatagtgactcagttttaaagattcagaaagccattactcaagttccttggcagaggaagtggccattatgttgctccctgcagctctgcttttgtggaagagggaaaaaaaagtatttttatttggtatttctctgagctgctcagatactttggccattgttagtgagtgcaggagcagaacagcccctgctattgttcaggctggccgctaaacatggcaagagcttcccgctgaactggggtaggggaaatgaccagaaagacatttactggatttggcaaaggcagaagcagaaaagagagcttcctctggctccaggagtctatttcttgcctcagcgggctcctctgccccccagcctggggcctgcccatcacacaacacgagagggcaccacttagaccccttcacctgcaaaccgtgcgcctgggagtttttggtgccgagaccctgtccctgtgggcacccctaacatgccctatattcaacaaacatgcatgaagcacctactaagttctctgatgagtgacgaccaggagcttccagtgttgtcaccatggtcggggaagggacctttatatagttgaggactgtgccatgtgaaaagtgccagtgattggatgagctgcagtggtccttgacccctaccttagaccttcatgcatcctgcacttgtgtctgttgcatgccatgtgaattctgatttctgctaatcagcgaatcagctgaggaagggatattgcaagcattgcactgggagcagttctctttgggcactgtttccatctttgctcctgcaagtttgtcatttgtgcaggaacttgaaatccgtgttaggttttatcttgacagctgctttatccagtggaaaatggaaaagtggaaatattgatgcactgattagaagtgtcgttgcatcttccatacgtaaccgcattcaggcactgatggacttcaagatgtgggctggatgtggtaaactgctgcctccatcaggtgctcattggagttcaacgcactggaccgtgtgttcagttgtgatgtagcaggacaagccacagacaaaacccctcagacaccgagttaaagaaggaagggcttcattcggctgggagcttcagcaagactcatgcctccaacaaccgagctccccgagtgagcaattcctgtcccttttaagggctcacaactccaaaggggtccgcatgagagggttgtgattgattgagcaagcagggggtacgtgactgggggctgcatgcaccggtaattagaatggaatagaacaggacagggattttcacagtgcttttctatgcaatgtctataatctatagataacataaccgattaggtcaggggttgatctttaactatcaggcccagggtgtggcgccgggctgtctgcttgtggatttcatttctgccttttagtttttactacttctttctttggaggcagaaattgggcataagacaatatgaggggtggtctcctcccttagtgaaggaaaaggacacaggtcacacacgccaacaccagcagtttcattcttagggaagttcttgggcaagtgcactgagtcatgagaaagttgatagccaccctctttgatatggcaaaacaatgggaatgaccgcaaacctccctcagtgagagaatgatagggtcacacaacgaaatattacatagcagtgagactgaacgaactacgtgtcagtgaatcagagaaacatataaatgaggccgggccaggttgtcatccctctaatcccaacattttggaggcccaggtaggaggattgcttgaggccaagagtttgagaccagcctgggcaatatagtgaaacctcatctctcaaaaaaaaaaatatacagccagtcatggtagcatgtacctgtagtctcagctacttgggaagctgcggtgggaggatcagttgagcccaggaattagaagttgcagtgaaccatgattgtgccactgtacttcagcctgagtgacagagtgagaccctgtcccaagaaaaagaaaaaaaaaaaaagcagccgggcacagagcctcatgcctgtaatctcagcactttgggaggctaaggcaggaggatggcttgaggccgggagttgaagaccagcctgggcaatatattgagaacttgtctctagtaaaaattaaaaaattagccgggcatggtggtgtgcacctcccagttactcaggaggctaaggtgggaggatcgcttgagcccaggagtttgaggttgcaaaaagctatgattgtgccactgcactccagcctgggcagcagactgagaccctgtatcagacacacacacacacacacacacacacacacacatatacacacaaaggaagttcgagaaaagcaccagactgagaccctgtatcagacacacacacacacacacacacacacacacacatatatacacacaaaggaagttcgagaaaagcaccagctgggcgtggtggctcacgcctgtaatcccagcactttgggaggccgaggcgggtggatcacctgaggtcaggagttcaagaccagcctgactaatatggtgaaaccccatctctactaaaaatacaaaaaaaggaaaaaattagccgggcatggtggtgtgtgcctgtagtcccaactactcgggaggctgagacaggagaattgcttgaacccaggaggttgaggatgcagtgagccgagatcgcgccattgcactccagcctgggtgatagagcgagattctgtctcaaaaaaaaaaaaaaagaaagaaaagagaaaagcatatcacagcagaagactatattcaaaccatttatatgaagctcaaaaatgaagcaaagttaagaaaaatgtagggatgtatgggtagtgaaagttaggttggtgggctttcctgggtattttatgcttcataaattaacttttatgtatgtagcttttacatacattatatatatgaatttgcatgtattcagtattatgtaatacattaaaaacaatgttcgcaatgctaaaaatatattgttgaagattctgtgtgaaagctatactgtagttgtggctttttataaccctttcaagccctctgggcagtagcagtccaccccttattgccctcagtggacttcaccttctagggactcagaattttttttttttttttgagacggagcttcgctctttttgcccaggctggagtgcagtggcgtgatctcggctcactgcaagctccgcctccctggttcaagcaattctcctgcctcagcctcccaagtagctgggattacaggagcctgccaccacgcccagcaaattttttgtatttttagtagagacagggtttcaccatgttggccaggatggtctcgatctcttgacttgtgatccgtctcgcctcggcctcccaaagtgctgggattacaggtgtgaggcccagctgggactcagattttgctgaggaccaggacagtactgtgtgctgtgtcctggccttgcagcagtgaatgtgtctcccgtttctcaagggcaggtctctgggatgcctgactgtgtcttccttgccagtgcctggctgctgcagcctcctcaaatgtttatcaaacacaggacttgcccaccgtgggagaaagtaaggccataggtgtctcaggaacctgcccaaactcgcctggctgcacggtgacaattcaaccagctttcttacccaaggtctgttggtgaccagagaaaaccttagatgaccggctgccatgatggccttatatctgtcccttttctgccagccttgaggtagagggtgccagggaggaggactctggctctaggtgttaaagtgagagggaagtgtgaagggtatctgtatagctagacagggctcaatgccaggcagagctgtctccgcccctttgatgtctatgtctctgtccctggactgtggccagtagccagtgtggactccaacctcaccagctttaggggtgttatctgcctgggagtcactgatccttactccctcctctgacagccaccttggatggggtgaaaggaaggacagcctgccaagtatgagataaaaacgcctcataaacaagaagggatttgcaggccaggcagagagccttgtgctgcttctgagtcccaggagcatgggcgaggaggtgaggtcaggcactcagcagctgctggtcctctctgaaatctttggccagatttattgctactgcttgctaataaatggttatgcatttggttcaaaggaccaagtgtgcttacatgaaaactggctgtgttccctggcctctgtttccttagctggttggactaatttgattggttaataaatgagtccaaggtggttgggctaatttttatcttagattctatgactctataactgctactcaaaaaaagtgtacttgttcctttaatctttaatcttatttttcttgagtagtagaatacacccaatttttttcaaggggtagagaatgcattttttttttaaccttccagtttggtccctagagtaaacacagcattgctgtagtagatgtagggtactggagggagcatggaacagggaaccagaagccctggttcctaccccagctgggcatctgggccagtctcttgattcctctgtgcctcagttaccaactatataacgggcattctgccatgaataccctgcgatttggaaacctcctgtgtacgtgtgcacttgggtgcctggcattcattcctaatggcatccattcgttcacacattcatccagtactcagcagactcctgccatgggccaggcaacgtcccgggcacttggaatataatggagaacaaagcagggtgcctacttctgtggtgcttggagtcttgaggggaagagagacacggaattcgtaattacatggcagcgtgtgggtgacgtattgcagaatgagggcctagtggagctgggggaccggaaacgatgtttaggccgagacctggaataggaggagttgtcgtggggatgatgtaggaagaacgagtgtgaggaggagagcgaggggagttgaggggagggctccacaccttctaaggagtggggagagatgaggcctccaaggacagaagggccctgcaggccacgctgaggagcttggacttcatcttgtggatggtggcaggcccttgaagggttttctaatccagggagtggggtggctggatcatggcttcagaaggctctcccaggcagctggatggtgaagaccaggttggggaggtcaccaggagaatgctgccctaatccaggcagaggtgacggtagcctgggccacttcatcattatcactgaggcctctcgtggcttcctcagaccagaacgaagcccccttcttcagtggctgtgggctcaccaagtgtcttctccctcctccagaggtggcgagaggcgtgctgaccagtctgccaggagacagcgtgactctgacctgcccgggggtagagccggaagacaatgccactgttcactgggtgctcaggaagccggctgcaggctcccaccccagcagatgggctggcatgggaaggaggctgctgctgaggtcggtgcagctccacgactctggaaactattcatgctaccgggccggccgcccagctgggactgtgcacttgctggtggatggtgagttgtgcctcagaggtcccggagatagttcccgtaagaaatgaggctttgtgcattccagacagtccctgtctgagccttcaaactcccaccatttccttggcgcaagaattttggggaaggcccaccaatgtctgccatccagatgctggcaaagactgctgctgggtgggagtgggagcgtctgactggtggggaacattggctttgggagttaggacttttggtgaactggtgaatagcctggggcccggagtcaggcagcctgggtttgaatcctgctccctcacatacagcttaacttctccacccttcagtttcatctttggcaaaataaggttaattttattaccttaccttagagttgttgcaaagggggtgtatgtgaatttgcgtatgtgtgtgtgtgtatatcacacacatatgctgctaaaaagtctgcatagcccatcctaagctctcaaattagctattcttatttttttagaattagcaagttcttagctccctcatacctagataaagacttcctggaaccagtgccctgtgtgtcgagccctatgccaaggcactttcttccttgtatctcttgtaatccttcagcagccttgtcagggaaagcaggcttatcatcatttccatcatcattacattatcatcagtttattttatacatgaggaaactgaagagcagctaggacttgcccaaggccgcacagccaggtctgtgtgactccaaagccctttttttcgatcatcctctctccccttcagacaagttggtcctgaggttcttcccttcccctgtcccggatccgtgtctcagactgaaaggaggactttggtgtcctttaatttcccagctgcgattccattcatgtgtggctgagtgtggccagggtcctgactagctccagggctggggccgaggggcccagccacgtgctcccctcaagggaggctgccctgtctgcgaggtcagtgcgccccaggatccccgcccgcctgctgacacctgcaatgctttcctttcagttccccccgaggagccccagctctcctgcttccggaagagccccctcagcaatgttgtttgtgagtggggtcctcggagcaccccatccctgacgacaaaggctgtgctcttggtgaggaagttgtaagtatcttgggctgagctatgtgcatgttggctccctccttcccgaggccccccagagaggggctggttcaggtgatttcaaaacattatcattaggaattaattccttcaggctgaggaagaggagatgagagggaactgagatttacatttgactgccccccctgagctaggcactgtgcttgtgcttggaaccttgtcctattcacttgaccttggttatcacaacagctatgggaagtgggctttatttttctcacttaacagatggagagactgaggcccagagactgattaacaggtttggttcacttagctagtaagtggctctgctgggaattcaatcccagtctgtctgatttcattcaaagtccgaagattatgggcgttgctctgaaaaacatgcaaatatccctgggagggggtgtagcacagccagaccattatcagtgtctgggcccttgtgggcgtatcaggctatttccatgataaagacacgagagagaaagcggtgatgggcgggggagagggagcttggggccgtggggggagaagtcacgcctgcctgggggctctgcatcatcaccggaagacggcttaacgtgggaagacctgggatgggttcaggcatggatgtagaggaggtggaagatgctgaaaacaaatctgcctctgcagttttgctggtctccatcccagagccacagtctcccttagtccagaggtttacaattgagtttgagctgtcagtcatcagaatatagggcaaggaggtcgcattccaagacccctagtggatgcctgaaatcgcaaatggtgctgaaccctatatatagtatgtttttctatagatatgtacttatgatagtttaatttataaattaggtgcagtaagaggttagcaataactaaaaatagcatagaacagtgataacaatatactgtaataacagttatgtgaatgtggtctctctgtttctcaaaatgtcttattactgtactcacccttcttgtgatgatatgaggttgtgaaatgcctgcatgatgggatgaagtgaggtgaatgatgtaggcattgtgactcagtgttaggctactagggctttctgaccatgtgttagaaggaggatcagctgttttgggtgactctgggtcaccgagccatgatgatggcggtggatgtcaggacgagtgatgggtagcatgcacagcgcaggaatgctgaacaaagtgatgattcatgtcctgggcgggacggtgtgaaatctcgtcacacttctcagaacagtgggcactttaaaatttctgaagtgattatttatggaatttcccatttaatatttttggaccgcagttgaccacaggtagccgaaatcttggaaagcaaaacctcagataaggcaggactactgtatcagaaagccagagcagtgacttcaatagggtggttcagctcccacttgggtctgtttccatagagttactgggctgcctggcagtcatgtttttgttctgtcctctatgatgaaaagtgcggattaccatctgtgaatgatgcagctgccattagcactgtcagctcatgccccaagcctggatagcttcacagcccagcaaaggatacaccttgtttgtacctcaaaggcttgtaccatagataggattagccaggatagagactgtggctggcagcttcccaggccagcctgtggaaagctctgtcatttctgacacttcaactgaaatacttttttttttttttttttgagatggagtttcgctctgtcgcccaggctggagtgcagtggtgggatctcggctcactgcaatctccgcctcccgggctcaagcgattctcctgcctcagcctcctgagtagctgggattacaggcgcacaccaccacgcctggctaatctttgtatttttagtagagatgaggtttcaccatgttagcggggctggtctcgaacttctgacctagggtgatccgcctgtctcggcctcccaaagtgctgggattacaggcgtgagccaccgcgcccggcttgactggaatactttccatgttgacagcgggagtgggagagagtacagtgcttgtcctcccgagcagcctcgtgcctttgcttccatctgctttgaagagtcagcatgaccactgggcgcctttgaagtgaggaaagagcaggggaagtggcttcgagagcctcaggggccccagcccccactgaggccccacccagacctcaggccactgcagggcctggaagagacaggcccctggaaagggattactgggagctctgctttttctcttgtgtgtctgctttcacacccttgcccaactgcagcactgctccctccttcttccacaggcaggggtgagctcagcctctgccttggaccaggcgcagtgctggggcagtgggaggaagcgggccaacaagactgagccccggccctctgaccccacctgggcacacacgtaaagcagtcggtgaccctgccttcgtggctgggtggaagcctgggtggtgttgggggaaggaggaaaggggctttaactcagcctggaaaggttgggtttgtcccatgtgctggattcagcaggagcccagggttcgaacccaagtcagaggtggcagactcgtcaccccagctggagggtgagtggttgacgtggcctcacatgcccacatgtgtcataagagggtgaagcctcaggtttccaggccaggtgggatggtggctgactcacctcgaatgtcttcagttacccagaattcttttctggactcacctgccagaacccctctagcactttttgtgtctctggagtggcatttctgctgggtgtctagtcatctgaggacagatcttttttgttagtgccttgaaggcagggtggggcctctcttgattcatttctatatcccctacagtgccaagagcacaggcccagcgggagaccagagctggccagccgaccattgcctgagtgactagctgagccctccagcctagctcccctcacccctcgtgccaggcgctaggctacatgtttatatatatttgtaaatccagctagtttcctcatctctagattttacatttattgctcaattttttttttttgagatggagtctctgtcgcccaggctggagtgcagtctctgtcactgcaacatctgcctcctgggttcaagtgattcttctgcttcagcctcctgagtaactgggactacaggcatgcgccaccacgccaggctaattttttattttattttttgtatttttagtagagacagggtttcaccatattggctaggctggtctcgaactcctgacctcatgatctgcctgcgttgccctcccaaagtgctagaattacaggcgtgagccaccgcgcccggccttatttctcagtcttaacagaaccagccacgtgtgattgttcatgcctgtaatcccagcactttgggaggctgaggcgggcagatcacctgaggtcagcagttcgagaccagcctgggcaacatggtgaaaccccatctctattaaaaatacaaaaatttgctgggcacgctcaggaggctgaggcaggagaatctcttgaacctgggagggaggcggaggttgcagtgagccgagactgcgccactgcactccagcctgggtgacacagtgagactctatcacaaaaacaaaacaaaacaaaaacttaacccctactaggtaagtagtattaatattcctattttcaaatgagaaaaggagacttagaggcacagggcttataagtctggagctgggattcaaaccccgggattccacttcccccttctgtcccgtcttgagtctgtgcgaaactgacaggcaagccctgcccttgttttgtgtctaacagtcagaacagtccggccgaagacttccaggagccgtgccagtattcccaggagtcccagaagttctcctgccagttagcagtcccggagggagacagctctttctacatagtgtccatgtgcgtcgccagtagtgtcgggagcaagttcagcaaaactcaaacctttcagggttgtggaatctgtacgtaagctctaaccccctctccagcagtttccttctcttttgatttaatactccttatcgacttctcagagtggcagggaaggggtggttgaggggtttggtgagttggtgccttttgggcgttgcttgccgggaggtgtggcaatgataaagcaggcccttgtggagctgtgcatggggagtgaacggggctgggtggggccctgcttgctgggatctcagcctacatgggcttctctacactatatttggtgctgcaaaggagtcatgctcacttttcccacagtgcagcctgatccgcctgccaacatcacagtcactgccgtggccagaaacccccgctggctcagtgtcacctggcaagacccccactcctggaactcatctttctacagactacggtttgagctcagatatcgggctgaacggtcaaagacattcacaacatggatggtaaatttatgttttacttctggtcagagaggcgcccctagatgcttaggcgtagtagaaagggtactagaggccaggcatggtggctcacgcctgtaatcccggccctttgggaggccaaggtgggcgaatcacttgaggtcaggagttcgagaccatcctggccaacatggtgaaataccgtctctactaaaattacaaaaaattagctgggtgtggtggcgcacgcctgtatcccagctattcgggggctgagacaggagaatcccttgaacctgggaggtggaggttgcggtgagcagagatcacaccactgcactccagcctgggcgacagagttagactccatgtcaaaaaaaaaaaaaaatagaaagggtactaaaaggaaaaccataggctctagttcctgcttcacaattggctaccttcgttgctttggataaatgttttaagctttctgagccttggtggtatatcatttattaaatgaaaaggataatgccaggccagtctcctcttcccgggcttgtctgtgaggagagcaatgtgggaagagatttgggctgtagacatgtcaagggttgtggcttgcaggattctatagtgcatgggtggggcagggactttctgcttcagcttccgtgggccctgagggcaaccccctctctagcagagcctctggggttgtgggagcctctagaggcctctgccagctgaagcacagggctggccaaggcaccaacccactggggtgctacctgcccagcaccatcctggatacctccccagagtcaccgtgcccccgccctcaggtcaaggacctccagcatcactgtgtcatccacgacgcctggagcggcctgaggcacgtggtgcagcttcgtgcccaggaggagttcgggcaaggcgagtggagcgagtggagcccggaggccatgggcacgccttggacaggtactgcggtgggcactgagaaaggaagggatgtttcaactgtcattgcatcaggtatccattgctatgtgacaagttgcctcaaaactagtggcttaggccaggtgtggtggctcacacctgtaatcccagcactttgggaggctgaggcgggtggattgcctgaggtcagcctggccaacatggtgaaaccctgtctctacgaaaaatacaaaaaattagctggacatggtggcaggtgcctgtaattccagctactcaggaggctgaggcaggagaatctcttgaacccaggaggcggaggttgcagtgagccgaaatcgcgccactgcactccagcctgggtgataagaacgaaactccgtctcaaaacaaacaactagtggcttaaaaacgaccatcatttatcggcttgaaatttcaaaaatacagtcagttaggcagctcttctgctggtcttgcctgaatcaggaatgcagctgccatcagattgggatggtctgagatggcctcagtcacatgtctgacgatggtgctggctggtggccgaggccctgggttctccctgtggcttctcatcctcagctgccagcccagactcagggcaggcgggtggggatcccaccacagctggagggatgcactgcagagaagttagccgtatttaatctagggctttttatttttttcaaatgttaaaggtagtaataattgccattggggattgttgaaattagagcatgaaaaattccagaaagatatgaagaataattatcaccagtacttttactccctagagaaaaccagtgagaacatgttagtatgctgctttcctttttctaggtacatgtatgtgtgtgtgtatttatatatataaatgtaatattccccatgttgtcaattacttttggaaacttattatttagtaactgcctgattaatacatatattttaaaactccatggaaatttgttgttgttgttgttgttttgtttgtttgttttgagacggagtctcactctgtcacccaggctggagtgcagtggcatgatcttggctcactgcaagctccgctttccaggttcatgccattctcctgcctcagcctgccgagcagccgggactacaggcacctgccaccacgcccagctaattttttctattttttagtagagacggggtttcaccgtgttagccaggatggtctcaatctcctgaccttgtgatccacccgcctcagcctcccaaagtgctgggattataggcatgagtcactgtgcccggtcggaaattttttttaacttaaatttttttttttttgaagacaggctttctcctcgttgcccaggatggagtacagcagtgcaatcacagctcacggcaacttctgcctcctgggttcaagcaatcctcccgcctcagcctcctaagtagctgggaccacaggcgtgtgccacaatgctaattttttaaaaatgttttgtagagacagggtttcaccatgctgcccaggctggtctcgaactcctggcctcaagtgatccaccagcctcagactcccaaagtgctgggattactggtgtgagccactgcacctgactaaactttaaatttttttttttagacggaatctcgctctgttgcccaggctggagtgcagtggcatgatattggctcactgcaagctctgcctcttgggttcacgctattctcctgcctcagcctcctgagtagctgggactacaggtgcacaccaccacgcccggctaatttttttttttttttagtagagacggggtttcactgtgttggccaggctggtcttgaactcctgacctcgtgatccacccgcctcgccctcccaaaatgctgggattacaggtgtgagccaccgcgcctggcctaaacttttaaaattttaatcaaattaatacatgcacatggcaaagaagtaataaacagcttataacactgagcagtggtcccttgtcccatgccttccatttctagtcctgctttctaaggaagctgcttgactctttctgtttctagttcctctgttggtgccctccttaactctaaacaacaagcttatatggcttttttttttccctgataaaaccacttgagacattatctatcaacaccctgctatgaaaggttaggatttagcagatctagaatgcaagaatctccctgaccacaacccagagagtggtcagccagcctctgcttaaatgcttccagagacagagagcttactaccccttgcagcaatctgttttattgttcccagtgtttttgttgtagaatggcttcatggctcactttggggtcaaatgtttctagccctgtggcgtagttgaaccaaattaatcattcttaaatacttggcagttaggaaaaaaaaaagaataagatacccatttatttgagtaagtatggataaaaaggaaaaggtagaattgacatcagtcccatcccgacccctgccactttctcccagccctggccccagggagagaaggcttttatctatgggctgcacattcttcccccagattggatggtgtggggtgatggctcttcctcctggctggctttgtactgtggggtccttgtcccttgtctttcctgtcctggggagagccagaggagtatgctggggcttagggtgtaatcctagttggatgcaataatatgaagtgccggcttccatctttgttggcactttccttgttcatcaaggacaggaggcagctttctattgggccctctcctcaaaagcttttttcctgctcagacctggacaaggagtggggcctaactactatatcttacttagggagaccattttaataaatcagtgcatccttcagggtagatcgtattgacctgtccatggttttctttgatttgtgtatactttgagccaaacacactcatttatctgaatgctgagcatcagtatggctttgggggcctttttaaggggggaaaaatcagctctaacatcgtgcagaggaataggaattccaaatataggctgatccctattttaccttttattccaaccacttagttcagatagtcacaagcagcttaaagcttgtgacaagcagcttaaaagcaatcttgcttttttataaagtttcttctaaaaattttcaaattgtaaaatgtacataagatttaccatttatattattattattattttttgagacggagtctcgctctgtcgcccaggctagagtgcagtggcgtgatctcagctcaatgcaacctctgcctcccgggttcaagcaattctcctatctcagcctcccgagtagctgggactacaggcacctgccaccatgactggctaatttttatatttttagtggagatggggtttcaccatattggtcaggctggtcttgaacccctgacctcaggtgattcacccacctcagcctcccaaagtgctgggattacaggcgtgagccaccgcgccctgcccatttatattatttttaagtgcacagctctgtggcattaagtattgttgtgcaaccatcaccactttacttctccaggacttttttcatcttgtaaaactgaaactcagaatctgttaaacagtaactttcctttcacccactccttcccccagctcgtggcaaccaccagtctacttgctttttctgtgagtttgactactctagtacttcatttgcttgcttgcttgcttgcatgcctgcctacctgcctgcctgccttcctttgtctctttctgtctctctctttttctctttttttttgagacggagtctcactctgtcacccacccaggctggagtgcactgtcgtgaccttggctcactgcaacctctgcctcccgggttcaagcaattctccagccttagcctcctgagtagctgagattacaggcgcctgccaccatgcctggctaatttttgtattttttgtagagacaaggtttcaccatgttgcccaggctgcactctaggtacttcaaataagtggaatcagagagtatttgtcctttggtgactgacttatttcacttagcataatgtcctcaaggtttattcatgtggtataacatgtgtcagactttcctccctttttaaggctgaataatattccattgtgtagagataccacattgtgttgattcattcatttgtcaggggacactgggtttgcttccccattttggttgtgcataatgctgctatgaacacgggtgtaaaatatctgtttagattcctgctttcagttcttttgtgtatatactcagaattataattgtggcattatatggtaattctatttttaaattttcatggaaatgccatgccgttttccacagtggctgcaccattttacacttacaccagagtgtataagggttccagtttctccacatccttgccaacatttgttatttttcattttgctgcaatagtcctccttatggatgtgaagtgttatctcactgtggttttgatttgcatttccctaatgattaatgtctttttttttttttttttgagacagagtctcaccctgtcacccagtctggagtgcagtggggcgatcttggctcactgtaacctccacctcctggggttcaagtgattctcgtgcctcagcctcccgagtagttgagattggcatgcaccaccacacccagctaatttttgtatttttagcagagacggggctttgccatgttggcgaggctgctcttgaactcctgacctcaagtgatctgcccatctatgcctcccaaagtactgggattacaggcgtgagccaccacacccaggctgaggatcttttcatgtgcttcttggccattcatatatctttggagaaatatctattcaaatagaaagttctttcttatgtgaacctaactctggcctcactggcccttgctctgttctcagggataaccaatgacaaatttcctagtctgctctctctgaattcttttggagttcccagacctgcatctgcttgggctcctcttcccaggctgttacatgagatggtctgtgaattcttcacctttctggcccccttcccctgaatctggtctcatttgtggatgtccctctttaagttgctgacactctccttctattggaagatggtgtggtgggggctgtctggccagcactgggtacggtctccactttccagcctcaggtggatgtgcttctttggcatagacacagcttctgtgggagctcagatagaacagtcggtttcttctcatgtaaggagcggaagactttgagccctccaccctatgcatgtgtggtttgaggcaggggaagtcttcaaaacccagttgtgaatatatccaagaaagaaacctgctgctcccctctctgctgagggaagagcaagaggaacttggatgattttgacgcaagagggggattcaggttggaaattggcgggcagttctgaaaaataaggggaaggttagagcactaggtgaggtgtgtgttatggaccacggttatttggctgttagggacgcatcagtgtactaaacactgtatcaccgtgtggggtgagcttacccaccccaaggaccttcagctctcaaggcccagacagacaggatgcacctgcctcccagactaggtgtgggagtggtggcctttgggagacacagaggtcctgggaagcacctgggagtcaggttgtatgacactggtaaagttagttcagctctcagagcctcagtcttgtcatcggtaaagtagagatgatagcaccaatcttgttcctttcagagagtttttgtgagtctgatgaaaaaatattctttagaaatgctaaagcatactgcatttgtaaggggatcagcaattacaggacagtgctggttcttgggaggagagtgggaccaggggcatcccagaatcactatcctggatgccatcgtgaactcactgcattggaatctggaggaggaagtagagtgggtggtttgagaaagctttcctggtggttttagtatgtgcttgagggggctggaggagggtgcgtgccccactgtagtatgtctaatacgtaatagatggtgttcacagcacgataaggccgtaagcagactgttctgttggggcagtttagagatagcaggaaaagcttcatggaggaggtgacaattgaattatgtcttgaaggatgtgtaggagggtcccagacagaaaatggggattgtaggcagagtacaaaggcacggagctgtgagcaaggggagggtggcagagagctgcttggtgaggccgacacgtgtgtgggtgggtggtctgagtgggacaggtggaggccggccttggtgggcccctgtaggagtggaagtggaatgccatagagtggggctctggagcctggacttcagcaggtgctgcccccttgaggctggggcctggccccccgcacagactgtagcccaggatagccttttgtatgaagttgggggtcccagggtcactctgtcttagccctgctttggccagcaaggccagcacggtcggcagctttctctcaagcgggagttctgaatttatcctctcctgatgggagttctccctgtcacatcaacattgagtctgggggaatcacaaaatcattttcttcttttttttttttttcagagatggtatctcattctgttgcccaagccggagtgcagtggcataatcatagctcactccagccttgaactcctgcctcagcctctgagtagctaggactataggcatgcatcacgatgcccagctaattttttaaaaaatattttacagagatgaggtcaccctatgttgcacaggccttgagtgatcctcctgcctcagcctcccaaagctctgggatttatagccatgagccactgtgccaggctggagccccttttcaaagagggcgtggggcaaaatgcctgggaaaagcccattaggtataagggggttattccttgcttctcacaaataatccctttaactccctctcctattccccaagaatgggaatcacacctgttggaggaggtgataccaaaggtttgcatttgcacatgagggggtgccctgaagccaggactgggcggtcagtgcctccagctacacgttatcttctcaaactctttggccatccattctggaggagtttgttttgttcctctctgcagcactcccaagtgggacattctggggttaaagagccttggttacacatttccggagagattttgccctgttcacttatccatatggcatccctgaattccctctctgccctgttttctgcagctttctggaacattccactggggccccgcccacttccactgcatcacctgccactttgtgcagagcactggctctggagtcaggcagcattgggtctagttgctgcccttgcccttgactagcacgaccctggggaagtacctcactgagactcagtttgcttatttgtcaaatgggaataataatgcctgcctcaaaaaacccaaaccccagccttgctgggttgtgaggcttcagtgaggtgagaagcaattagcacagagcctggcacatgacaagggtgcaataaatgccagcatgactgcctttcacccgtatctcctgccaagcctgtctctcgagctttggattcatgtcttcaacttggcccagacttctggccagatcctccctcctgtgccaggtgctccgcatgacccaaaccaaacatatcacacccctcacagatctccctgccctgcttgtccaggggacaccccacccacccagctacccagccaggagcttgcacatcgcaccaaatgtctctgccttggtttgggttcttgccacatctcaatagcatctagcagtcagccattctgttgcactccactcttcgtgcccctctccacgaccctcctccctcatcctcgcattgcctatccgcctgacatccttgtgcacaactgggtgattcctaaacgttgggatttcacgggtctgtaaaatttcaaaaacaattctggggaccaattaaagttgctagctttttttttttttttttgaaacggagtttcgctcttgttgcctaggctggagtgcaatggcgtgatctcagctcaccgcaacctccacctcctgagttcaagcaattcccctgcatcagcctcctgagtagctgggattacaggcatgcgccatcatgcccggctaattttgtatttttagtagagacggggtttctccatgttggtcaggctggtcttaactcttgacctcaggtgatccacccacctcggcctcccaaagtgctgggattacaggcatgagccaccgtgcccggctggttgccagcttttaattttgctaagtaaggacataaaatgtaacaagtaagtgataaataactattagcatttaccatcaccataatttcataaaagaaaggatgcttggtcaggcgtggtggctcaggcctataatcccagcactttacgaggctgatgggggaggattgcctgagcccaggagatagagaccagccgggcaccataaggagaccctgtctttacaaaaaaaagttaaaaaaaaattagttgggcatagcagtgcacacctgtagtcctagctaagtgggaggctgaggtggaaggatcacctgagcccagcagttggaggctgcaatgagctatgattgcactactgcactccagcctgggcaacagagggagaccctgtcttaacaacaaaaagactccttaactgccccccacacccgccccccccaaatgaggaagggtgaaacctcaaaatgaggggcgcttttggcacccagacactgtggagatttgtacacacagccttttctgtacttgtctccactaggcttctctccacagaccatcccgggtggcatttgggacccagctggaggtgagtcatttctcctcaggaggctcctcagtgaggtttatttatttgtttctacacgaatagaggagcagtgatgagctgtctgttgggtggtttaaaggctgcgaggaaaggtgtgaagtagggtccccttgctcagcacgcaggagctgcctggcgccactgagcctgtgggtcccacggtctctcctcccctcttcctgtggctttgtggttcattaccactttaaccccagaaacctgagccgccagaggttactgggcattctctgggccacaggctgtgttgggggtcaggactgagagtagaaactttcttcctgaagcatctgtcttgagtatagtatggggagcctttaaaaaaccctaatgacagctgggcgcggtggctcacacctgtaatctcagtactttgggaggctgaggcgggcggatcaccaggtcaggagatcaagaccatcctggctaacacggtgaaaccccgtctctactaaaaatacaaaaaattaggcgggtgtggtggtgggcgcctgtagtcccagctactcaggaggctgaggcaggagaatggcttgaacccaggaggcggagcttgcagtgagctgagtttgcgccacagcactccagcccaggcgacagagcgagactcggtctcaaaaaaaaaaaaagccctaatgactgggtcccatttccatggttctgaggcaacaagcaaggtggagccttcaaggctccagacgaagctgactctggcggggtttggaaaactgctgaactgcacgagcatccatgggcagccatattttctatttagggctgccccatcttcttcttgttttcttcttttttttttagagatgaggtctcactatgttacccaggctggtttcaaactcctggcctcatgggattctccagcctcagtctcccaaagtgctgggattacaggtgtgagtccggcctgcccccatcttctttgtcttctgattttagctttcattctagtgcctccatgccctcaggtcatcctttagataccctgggctataagtgtgtaactgtcctctgctgggctgggaagaacgcaaaggaacaataaactgggtccctcccatgaattctaggttcaattcaggtcgcacttgctgtgcggccttgaacaagtcgctttccctctccgggcctctgtttcccctctgtacaattggaagagtggatgcattcttatacttcctctggtgctgctggtgtgtggtttcccccttactggtgatggcatactccaggaattctggaaaccctccctgacgccgaagcagggtcaccctctccccgcctccttgctagtccttactcctggcccagcgaggctcgtgatttttgtttaaaccattctgtggaattttagaattcttgatggaaaaatgatgagctgacaagaaaatgttttgaaatccagagcattccactcactgcctgttacggttaaggcccaggctttcgcttggatacttagcctcctcttgccttggggtttccgcagaaacactgttcccgtgcagggggagggagccgtgagggtgcctggtccacatccctgctgctgcaatgtgtactaaacccatacaggcaaatgaatatttatttgttatatattttttattgcaaaaaggtgcatagaaggaaattgaaatagtgcttatctctggtgatgtgtatctttccattttcttcttcctgtgtgcaaatatatagtattatgatatatactgtgttacacaataatcataaaaatatatttctttagaaagtttgaatcaaaatacatagaatttttcttgtcttgcattcttcatacagcattatgtcatgtcttcaatgtttttctaaaatatttttggccagacgtggtggcacacgcctgtagtcccagatacttgggaagctgagatgggaggatcactgaagcccagaagttaaagctacagtgagccatcatcatgccactgcactccagcctggcgacggagcgagaccctgtctcaaaaaatatataataattggccaggcacggtagctcatgcctgtaatcctagcactttgggaggccaaagcggatagatcacctgaggtcaggagttcaagaccagcctggccaatatggtgaaaccctgtctctactaaaaatacaaaaattagctgggtgtggtggtgggcgcctataatcccaactacttgggaggctgaggaagaagaatcgcttgaacccagtaggtggaggttgcagtgagccgagattatgccacttcactccagcctgggcaaaagagtgaaactccatctcaaaaaaaaaaaaaaaaatatatatatatatatatatatacacacacacacacacacacacacacatatatatatacacacatacatatatatacacatacatatatatacacatacacatatatatatatacacatacatatatatatataaaataaattttaaaagtttctgcattatgtagttatgtcataatttctacagctagtcccttacggttggatatttggttatttccagcatgctgttttttgttttgttttgttttgttttgttttgttttgttttgtttttgagacggagttttgctcttattgcccatgctggagtgcaatggcatgatctcggctcactgcaacctccgcctcccgggttcaaacgattctcctgcctcagcctcccgagtagctgggattacaggcatgtgccagcacacccagctaattttgtatttttagtagagacagggtttctccatgttggtcagggtggtctcgaactcctaacctcaggtgatctacccatcctcccaaagtgctgggatgacagacgtgagccaccgcgcccagcccatgctgttcttttaaataacattgagatgaactttttttttctgatgctgaagcccctgagacaggactccagggcccatgaatcactaataatgagcctttcttctgtccgcagaatccaggagtcctccagctgagaacgaggtgtccacccccatgcaggtgagctcctgttcttgtaaaagggtcagggctgcagcacctcgtgtttaggagtgtgggctgatgccagaccgaatttggtttaaatccagttctgtcactagtagaaatgtggtcgtggtgagttacctgtgcttttcaaacctctgtgaaagggaatcatagaaattatcttgtcccaggactgtaaggagtggagcagcgctggcctggcgtgcagaactgctctgcgtctagcagctgctatttcatctctgagctttttggacaacgctaatggcttagcttgagattggattctgtttatctgcatccttcccctgtggactcttggtgacataatttgctggaaagaggattacctctgaagctgcttaacaaattccttgagtaatccaatttcctatccaactatatctcctcctgtggcccttaattccctaaatgctaagctgggagtcatagccacttctggagctgtgcggcacagggaaggagcctggggctcttgaaccttatctgtgttccatgtaggaacagctgcaggtgaagcccatacccatggggctagagtgctcccaacacgggttctggggaaactgacaccgactgaggactggccacatcctgctaaactgtgagccttgcatttgctgtttcattggctccttatgttaacattgcaagggagtgcttgtaagggctttttttttttttttttttttttttttttgagacggagtctcgctctgtcgcccaggtgggactgcggactgcagtggcgcaatcttggctcactgcaagctccgtttcccgggttcacgccattctcctgcctcagcctcccgagtagctgggactacaggcgcccgcgaccgcgcctggctaattttttttgtatttttagtagagacggggtttcaccttgttagccaggatggtctcgatctcctgacctcatgatccacccgcctcggcctcccaaagtgctgggattacacgcgtgagccaccgcgcccggccttgtagggcttcttaacgtgagttaagtctgaggccagggccgggcacaggggctcacacctgtaatcccagcactttgggaggctgaggcaggcagatcacctgaggtcaggagttcaagaccatcctgaccaacatggagaaaccctttctctactgaaatacaaaattagctgggtgtggtggcgcatgcctgtaatcccagctatttgataggctgaggcaggagaatcgcttgaacctgggaggcggaggttgcagtgagccgagatcatgccattgcactccagcttgggcaacaagagtgaaactccatttcacaaaaaaacaaacaaaaaaaaagaagtctgtccaaggtgacatagctcgtaagtggtggaaccagcattccagtcatggtagtacctgcatccttgcatcggacctgtaaggacaacagctgcttcagtgtatccactgagcatcttctctgtgcagctttaagcttttggtggagaggcaggtggaaagaaagccccacctttagcaggcatggtgtggatagaaaaaatgcaaataatagtattattgatttttccactgttatgaatgaaatggagaaaggaatgctttgggtggatcagggagggctctgaggaggaggtaactcctgaactggttctgaatgatggtgcaatctgcagaaacaggctgatggtgaggaatgtctcttttaggcacttactactaataaagacgatgataatattctcttcagagattctgcaaatgcgacaagcctcccaggtaaggactgggtattttcatattcccagggtccgagggacagaagatttgtctctgcagaaagtcctttcttatttggacatgtcgtcagaggatcaatcacagatcaatcgcagaaatgttctgtgtgtgtgtgtgtgtgtgtgtgtgtgtgtgtgtgtgttggagagagtcttgctcggttgcccaggctggagtgccgtggcatgatctcggctcaccacaacctctgtctcctgagttcaagcgattctcctgcctcagcctcccaagtagctgggattacaggcgcatgccaccatgcccagctaatttttgtatttttactagagacagggtttcactatgttggccaggctggtcttgaactcctgacgttgtgatccacccacctcggcctcccaaagtgctgacattacaggcatgagccaccgtgcctggccagaaatgttcttttattactttatatgttgaactttgatattgttagctaagatataatgaggagaccgtaagaaaagtgggacaaatcacttcgagatatttgaaaagtgagatatttcacagttggcccacaatacaaatgaatgtgctgcaaacaagattattggagtctgaaatggaatacctgttgagggaaatctttattttgggagcccttgatttcaatgcttttgattccctatccctgcaagaccaggaaagcttaccagtatttgaatcaagaaagatcacaagtcctgtgtttgactaggtatatgggacttatggaatccagactccagaggttcagtagttgagcagctcccctgatgactcttgggcttcgtgaggcagtccttgccctcgttccccatccctgggtggattcctgcctgcactgatgctggctgcctctgctacaacagcccaggtacaaagccctaccatggtgcagtgcacctgtggaggacctgctaaatacctggggctgagctctgcacagttggggactcggagaggattagagccatccctgttctcaaggaggctacagtccaggctctgacaaagagtaaattggtaactgtgacaaagaccagcatgtgagatgggccaaaagggaggcacagataaagcaaagtggaatttagagatttgaaagagtatatcaagctgagcagtcacagaaagctcatggaggaagtgccatttgaaatgggctttgaatggtatgggtgggatgcaagaggttgggtgttcaaaggttgctatgggccgggcgcggtggcttacgcctgtaatcccagcactttgggaggccgaggtaggagaatcacctgaggtcaggagttcaagactagcctggccaacatggtgaaaccccatctctactaaaaatacaaaaattagccaggcgtgatggcaggtgcctataatcccagctacttgggaggctgaggcaagagaatcacttgaacctgggaggcagaggttgcagtgagctgagatcgagccactgcactctagcctgggccacagagtgagattccatgtcaaaaaaacaaaacaacaacaacaaaaacaaaagctgctatggaggaggggaacctccagtcctcttcgtccaccctcactgatgattttttttcttttttttgagacggagtctcgtcaagcgattctcctgcctcagcctcccgagtagctgagattacaggcatgcaccaccacgcctggctaattttgtatttttagtagaaacggggtttctccatgttagtcaggctggactcgaactccccacctcaggtgatctgcctgcctcggtctcccaaagtgctgggattacaggtgtgagccaccgcgcctggccagcattctcaaatttaacatgtctaaaagagaacacctgacgcctccccacctattcaacccagatctgttcttctccatcttccctatctcagtaactggtaccgcatttgctcaggtgcgggggatcgggcaggcttcctccctactcctcatcctgtgtccagtccctcagcaagcgttgtccttgtgctttgagacgtatctaggaattgaccactcctcaccatctccagtgccaacacccagtccagcccctgccgcctctcatccagcagggcttcctgggctgccaactggtctaccaacttctagtcttaacccccaaccaactcttttccaaccagcacttagagtatcccttaaaacacaaatccaagctctctctggctcagtaccatctcccccagagtaaaagtcaaagtcttgacaaagtccccagtttctacgaggagtcccagcaaagccatgtggtcccctatctttagacgttgcctctccattctccctttcctcgctctgccccagccacactgccctccttgctcctccacacatgctctacctcagggcctttgcacttgctgtgtgctctgcctggacacgcttcctctgacattcactttgccagctccttcctattactcaagtctctgctcagatgcacccttctccgggaggcttttcctgataatttttttaaaaaacatttgtttggccgggcgcggtggctcacgcctgtaatcccagcactttgggagccgaggcaggtggatcacgaggtcaggagatcaggaccatcctggctaacacggtgaaaccccgtctctactaaaaatacaaaaaattagccgggtgtggtggcgggtgcctgtagtcccagctcctcgggaggctgaggcaggagaatagggtgaacccgggaggcggaggttgcagtgagccgagacagcgccactgagcaagactccgtctcaaaaaaaaaaaaaattcatttgtctgtctcccttgattggatgtaagatccatttagatacatgataggcactcaaagaatatttgttggatgaaagaaggaacaaatatatggccaggcgccgtggctcatgcctgtaatcccagcactttgggaggccgaggtgggcggatcacctaaggtcaggagttggagaccagcttgggcaacatggcaaaacctcatctctacaaaaaatacaaaaattagccgggcatggtggcatgtgcctattgtcccaggtacttgggaggctgaggtaggagaattgcttgaacccgggaggcggaggctgcagtgagcggagatcacaccactgcactccagcctgggtgacaagagcgagactccatttcaaaaaaaaagaaggaacaaatagaaaagatgatgaaatgttaataaatgagcaagccaagcatactgctttcattacacagctgcatctctcaagagacatgggacatgcttggagaaacttgtctttgcagccagcgcccgctcaccagtctgggctctctgcgctgcctgactctagtaggcatctgaagtgatggctggcaggcagcctcttcgtcagcagtggattgcattttgggtagaagagcctgaatgctgggtccatacaactgtgactgcattcccagcagaaggagatggttttgtttagatgtgccctctgtctagtccagggactctggcagtggtaggaagagcctttctgtgggaagacatggctgcttgcaaagctggtttgttctttccttcattcaaagaaatattttggcgatcctactttgtattcggcactgtgtaagctgctggcagtgttacagtgaaaaagacacatgtggtccctgccttcagggaactcagtctagaggtggaaatggagaaatactgggaggggcacttgctcagcttggagtggggtcaattctcaaaggaaatgacatcacctcatctgagatccaaaggccaagtagggactagaccacaaaagggtgcagcaaaggtagagaaaacagacaggagagaagagggaacgtgtgtggagagccctggaggaaaaagatcatggcttgttggagaactgaatgaagttcatatggctggggcttgagtaccaaatgcagggacaggcaagagatgacacccccatggagaaaactgcttccaaacacttgatttaaagcatccaatcctctctgacattgtcctcaaaggaactgccatcaaggaggtccccaaagccttccgtttgttgtaccctctttgtgccttgtgggagcaggtggaatgtcaccagaaaagccactctgaaagtgagtaggagtctgtggctagccacaggcgctcagaaaccctgagcttgaggtgtctctcttgccaagtggtggaatcctggaatctagagtgggctttgttaagaaacaaacaaacaaacaaacaaaaaacagttaagcttgtcaaatggcctgttggttggcagagctgtttcattttctgggaggggggttggaggggaaggttcctttgaggcttttgacagcaccagctaagtggttttcttctcctcctattcctttttctccatattctcctcttcctcctctatcttcaattttttttttaacctagtgcaagattcttcttcagtaccactgcccacattcctggttgctggagggagcctggccttcggaacgctcctctgcattgccattgttctgaggtgagatgggtcccaggggatggccctgtggtgttctcatatttcttatctagctttcctttgcccattctgaaatttatggtgcatttattcattcatttatccattcatcaaatgaatgcacacaccacaacacacacaacacctactattatgccaagccgtgttttaggtgctgcaggagacaatgctgggcaggacagatacagtctcaggaagaagtcagacacgaagaggtaatcactactgtggtaagagctacaaaaagcatgccatggtgaggagaactgacctggcattaaggaggaagaggaattggtctgagaaagaagagggttctttttttttgagtcagcatctcactctgtcacccaggctggagtgctgtggtgcaatctcgcctcacaggacaacctctgcctcctaggttcaagtgatcctcccacctcagcctctggaatagctgggactgcaggtgcacaccaccctgcctagctaatttttctattttttgttgagatgaggtttcatgttgcccaggctggtctcaaactcccagggtcaagtgatccgcctgccttggcctcccaatgtgttgggattacaggtgtgaactaccatgcccggcccaaagagggttcttaggagagaagcccagcatgtaatatggttgacagcgtgtgcatgcacgtgtctgtgaagggggcgcagcacggttggggcaatatggggcaggaagagtggacaggtaggctggcaccaggtcataaaaggccttgaaagaggtgggaggattttaggccttctcttgaggctaaggagtgtctgttggagtttttttctttttctttttctttctctttcttttcttttcttttttttttttttttgagacagagtcttgctctgtcgcccaggctggagtgcagtggtgcgatctcagctcactgcaaccccaccttctgggttcacaccattctcctgcctcagcctcctgagtagctgggaccacaggtgcccgctaccatgcccggctaatattttgtgtttttagtagagacagggtttcaccgtgtcagccaggatggtctcgatctcctgacctcgtgatccgcctgcctcagcctcccaaagtgctgggattacaggcgtgagccaccgcgcccagcctgtggagttttaagaagaacctgggccaggcgctgtggctcacgcttgtaattccatcactttgggaggctgaggcaggtggatcacctgaggtcaggagttcgagaccagcctggccaaaatgataaaaccctgtctctactaaaaatacaaaaatttgctgggcatggtagtgcttgactgtaatcccagctactcgggaaactgaggcaggagaatcacttgaacctgggaagcggaggttgcagtgagccaagattgcgccactgcaatccagcctgggtgacagaatgagactcatctcaaacaaagaaaaccaaaaagtcactctcaatgcagtttggagactggatggggtgagtgaaaatggatgcagtagcccagggtctgggcaagagataataataaactgttttaggatggtggcaatgggttggagagccatgaatagattcttttttttttttttttgagatggagtttcgcttttgttgcccaggctggagtgcagtggtgcaatctcagctcactgcaacttccgcctcccgggttcaagcgattcttgtgcctcagcctcctgagtagctgggattgcaggtgaatgtcactacgcccggctaattttttgtattttcagtagaaatgggatttcatcatgttggccaggctggtcttgatctcctgacctcagatgatccgcccgcctccgcctcccaaagtgctgggattacaggcgtgagccactgcacccggcctcaagatatattttagaggtagaattgacaaggcttgacaacagattagatgaggaggatgaaggagagggaggagtccgggatgaccctcccatttctggcttcagcagttgggcagatgatactgtcattcactaagactggaaacacctgaggatagacaagtctcagtgaaaagtggtgattccactttgggacccacttgagtttgagatgccccgagaacctcaagcggacacgcttggcaggcaacacagatcgtcaccagcaagtagatggcaataagagtcattgggtgggggttggggatagggctgaaccctgtggggatccaaggtgaaaagttctgtagagaaggaagtgttgggaaaggggctgagaggaaccacaagattctggtgttgtaagaacgagagggagggagtgtgcattagacactgaagaaacacagtaggtgttggaattacaacatgaatatgacctttcctcccttccgagaaccacatactcaaatgatgaaaataccatgtgaaggtattttcatggtagctaacgcctgtaatcccaacactttgggaggccgaggcaggtggatcacttcatgtcaggagttcaagaccagcctgaccaacatggtgaaactccgtctctactaaaaacacaaaaattagctgggcatagtggcacatgcctgtaatctcagctacttgggaggctgaagcaggagaattgcttgaacccaggaggcagaggttgcagtgagccaagattgcaccactgcactccagcctggacaacagagcaagactccgtctcaaaaaaaaaaaaaaaaaaaaaagaaaagaaaagaagaaagaaagtaacattggagaagcaccacacagttaaatccaaggcgcccaagcaggacctccttaggaatattccatgtatcaatccaggaacttaaaggtcacctttaaatgctctgccctagtgttcttttccagccatggttaggaaatactcattcaggctgagttgcaccctggctgctgtctcatcatgcccatttcatcccaatcatcttcgctccatttggtcattggttttgtcattcatttccaagtctgcagaaaagtcagccaatagtgccttcagtgaacaagcaataatgaaatttttcggtgttcacaattttactgcaggaaccggctttttttcataagctgaaaccctaaaagatgtcaggctgggtcttctaggcagtggttaatcgcgatgatctacaagtggaggagacattgcactctgtcctttctacatgtagagagctttctacacgttagctcatcagaccctgccagtagccctgacctagcttgactaccaagtgtggtgtgggttgaaagattagcaagatgactactcaaattgggttcagggttgttttcactttttttctttttctttttctttttctttttttttttttttttgagacggagtctcgctttgtcgcccaggctggagtgcagtggcgcgatcttggctcactgcaacctccgcctcccgggttcacgccattctcccgcctcagcctcccgagtaggtgggactacaggcgcccaccaccacgcctggctaattttttgtatttttttttagtagagacggggtttcaccgtgttagccaggatggtttcgatctcctgacctcgtgatccacccgccttggcctcccaaagtgctgggattacaggcgtgagccaccgtgcccggccttcactttgctttttcaatgaagtagattacaagccgtctgaagggtgcgtgcaagataagattcttaatgagtagaggtagctccttggaggatgcaaagcctgttatattttttggccagtgaggggccatgtcagcatccacgggttcacctcctgcctaccaaaggattccttgcctcaccctaggtataccctcctgtgttctggctctgtgtctacgttagggcttcaacagacttttctcataacccaccacaggccctatagagtagagtagatatgatatacatttgacgggaggaaactgaagctaaaagagatggtgcgataacagctagtaagaataggccaggcgcggtggctcacgcctgtgatcccagcactttgggaggccaaggcaagtggatcacctgaggtcaggagttcgagaccagcctggccaacgtggagaaaccctgtctctactaaaaatacaaaaattagctgggcatggtggtgcacacctgtaatcccagctacttgggaggctgaggtaggagaatcgcttgaacccgggaggcagaggttgcagtgagccgagatcgcgccactgcactccagcctgggcagcagaaggagactccatctcaaaaaaaaaaaaaagatgaagaagaaggccaagaatcaaaccaaaaactcctgctatttctatagggccttaagggtcatctagtcaaactctttcattttataaatgaggaaacagcccccaaaggtaaaatgacttgcccaaggacaagcaagaacacacaccctgagagtccctgcccatggtccccacctgctattggctaagagctgggcccagctggtcccattggcccaccactggcccttaacatgcagcaccatcttggtgtgttgtaatggctaatagaggagcattaggttgggaacagacctggtttgctattctgctgatgatgcttggacactggctggttgctaaacaaccagagtccctgcaggcacagacagggccagtgccctgtgctgagaacatgccaggaatttattttctagcctagtgagtttccattttcttctgtataaggcaaatttgtttggaaagaggccagttatttcaagtgatgaagaagccttctattccccaaatcccctctgtctagcaaagagtataaacttagaaatactgtggggctctgggctgccaaaatggctgaaccatggttaccatgggatggccacatttacagtaggtgaagtgtgagaggttgacttcatcctgccagtgtatactatatttttttgtatggccctaaatctttttccagcaatatcagtgatttttttctttgttttttattactcattctttttttctgaatcatagatgattttttaaaatttaaatatgctatcgaaaaggcttgccatcttacaggggccaattcctcccaccctattctctgtcccccactgattctctgtattttaggttatcaggcactgggaaaatagaattctcctagtagagaattatttttctgcatatttatctagaatgagcttacatcattaagtgaggacttcctatgtgtatgcctatgacttaaacatcatttcgttttgaatgtagtgtatcattccggtattttaaaatcagagcttttgctacctccacagctgggggacgggcagagggactttcatggtgttccgggccatggaggtggctgggtgcagtgggcactgtctgtggcctttggggtaaaaggggtggcaacttggtttctacatatctttctaaaaaagagtgagagttttgagcattttaaaaaacttcttttagctacagaatcttttctttaaatgaaactttttgaagcccaaatatgtaaaatagataaaaggtggaggtcaaggtgcaaaagaaggcagcagagagctcatctgtttcttctttctgcccaccctgtgtcctctccagcccccaggccctgctcacacccatccaggccagctctggacaccctcaggttggctggtttcaaagtcctctttgagtttagtgattttcagaaaagaattcatactcgccttagaatatttcaaaaggaaagctcacctttctttgttacccattcagttactttgaaaaaaaaactgaggacagagattgcttccatattaggtcaatagggacttaaaaaatatatacatacacacatacatatgtatgtgatatgtgattattactggtgatttgctaaataatgacaaatggaaaaaaatatatgtcatccaaagagagccactgttaattttcaaaatgtaaatgtgattgaagtctaacaaacatacagaaaagttcccacatcatgtgtacagcgccatgaagtgtacacacccatgtcattataatgagatgcacgtggcaagtcaagatgccaagacaccaggttgcagcagagaaagaggtttaatcagagggtcaccaaaggaggagatgggaggaaacctctgtagggtccagccgtacggagcttagcgggtgttctccccgtgtgtggagacgagagattgtaataaataaagacacaagacaaagagataaagagaaagcacctgggcctgcgggaccactactatcaagatgcagagaccggtagtggccccgaacgtctgggctcgctgatattttttgcatacaagacgaggaggcagggtaaggaaggtaaatcttctaagtgattgacaaggtgaagcaagtcatgtgattacaggatcgggggcccttcccttttaggtagctgaagcagagagcaggcagcatatgtcagggttttcttctctgcacttataagaaagatcaaagacttttaagactttcactatttcttctactgctatctactatgagcttcgaagaggaaccaggagtgcgggaggagcatgaaagtggacaaggagcatgacccttgaagcacagcaccacagggaggggtttaggcctctggatgactgcgggcaggcctggataatatccagccttccacaagaagctggtggaggacagtgttccctgactcctccaaggaaaggagactcccttttgccggtctgctaagtaacaggtgccttcccagacactggcgttaccgcttgaccaaggagcgctccagcggcccttatgccggcatgacagagggttcacctcttgccttctaggtcacttctcccaatgtcccttcagcacctgaccctatacccgccggttattcctaggttatattagtaatggaacaaagagtaatattaaaagctaatgattaataatgtttataataatgattgataattgttcatgatcatctctgtatctaatttgtattatgactattcttattctattttctttattatactgaaacagtttgtgccttcagtgtcttgcctcggcacctaggtaatcctctgcccacacctcaaatccatctccccaaggaatttggggctagggttgtaaaaatgttggactgggccaaagtgtggagatggttgactggttgcagggtgtagggtgaggtcctgggacaaggagatgaagaagctgtcttctcatgccaatcccgttcctctgtgagggtcttcaaactggttgccggaattaggggtccgtaaaacatcttaagtgatccttaaacaaaagtcttaggatcctaatgtcagaaatcctatctacagaaacaacggggatgcagatggtcagtgtctagggctacgtgactttttgcaataaggaaatgggccaaagtgcagcctgattactgcttcattataactattaatatatttctgtccagaacccagcatgcaatttttgtcaaccctgtggagatggttttacaatcaacacccagatcaagaacacttaatatttagacaaatctcctgagtctttttcctctgcctagtttcttgtttgtttttacacagccatgattattctgtatcctcagctctgcatcctgcctttcacacttagcactataacacaggcattctttcacattagtacaaattcttgtaaatctcagacttttttttttttttttgagacggagtttcattcttattgcccaggctggaatgcaatggtgcgatctcagctcactgcagcctccgcctcctgggttcaagcagttctcctgcctcggtctcctgagtagctgggattacaggcgcctgctaccatgcctggctaatttttgtattttttaatagaggtggggtttcacaatgttggtcaggctggtctcgaactcctgacctcgttatctgcccgcctaggcctcccaaagtgctgggattacaggcgtgagccaccgtgcctggccataaatctcactttcattagctgtagtattaggtggatataccaatttctcttaatcaacctcctattactcctaattggtggcacccaaacattaccaattatttgggtgttattttgcttttatttaattaattaattaatttatttatttattgagacacatcactctgtcacccaggctggagtgcagtggcacaatctcagcacactgcaacctctgcttcctgggttcaagcaattctcctgcgtcagcctcccaagtagctgggattacaggcatgcgccacgacacccggctaattcttttttagtagagacagggttttgccacattggccaggctggtcttgaactcctgacctcaagtaatccacccaccttggcctcccaaagtgctgggattacaggcatgagccaccacacccggccttattttgcttttataaaaaacactgtgttgaacatctttgtgcataaagggtttttttttttttatagctatgttctttcttttcccagaagtagaattcctgggtcagagagtctgaattctttgaaatccagagtgtaatgattctctcctcagtcctttcttacaggagaactccattcaatgactcagcatagctccagtcagcagccctgctgggctctcttcctgtgtggtgtccacatggtgaagccctaaataatattctgcagattgtttatttcatttggataccaagctaaaagccagtggcagatttggagccaactattaattatttatcataacaaggacaggaataacctgtcgatataaaaagaaacccaaggaaaatccccaaatcttgtttttgacattggtttcccctcctctttcccagcccttcctggagtaactgatcttccatggaattgagggaggccaccttgttcccactttggggttaggaggcatgtcagtcacaaagtgggaagcaagagggaggggctgaggcttggggcactggccaccctggcacagttgaagggcccctttaggaaggggacgtgactgtgcttttgaagatccatgtcaccatttcatctttctttgagctgtcaagtgacttttctcagttactgagccctggctttgggcccagagtggagcactgtgaaccaagctgtgatcagaaagatgtctatctccttcctgtgtagcattgactttcctgtcagatgagtcaaattgtgcccagtggtgccgacagttgagtctgtgggaactcaccagcatggtgggagtggaccgagaggcgtagggagaactggggaggtcagcaacattaggagcaagaggaacaggaaggcagttgagggagcagtgggacccttttcctgctattacatggcggttgcaaattatctgcctcctgccagccttactttgaccgagaggcccattttctttccctactaaaagaatgctttctttttttattttctttccttttctttttttttatttttgagacagagtttcactcttgttgcccaggctgaagtgcaatggcacgatctcagctcactgcaacctctgcctcccgtgttcaagcgattctcctgcctcagcctcccaagtatctgggattacaggtgcctgccactacgcctggctaatttttgtatttttagtagagacggggtttcaccacgttggccaggctggtcttgaactcctgacctcaggtgatccgcccgcctcggcctcccaatgtgtggggattacaggcgtgagccactgcgcccagcctatttttcttttttttaagtaaatggatttgggactgatgatgtgtacctaatgaacagcctctgcaatgggacaattaagggactgttaagtgactttttggtgcctcagtttcttcacttgtaaattggaccaacaatacacatctatttccttgggagtgttttggaaactcaccaactcttcagagtatggtgaactccctggtgataaaaacagtcgggtcgggtgtgccggctcatacctgtaatcccagcactttgggaggccgaggcgggcggattgctcgagcccaggaattcaagaccagcctgagcaacatggcaaaaccctgtctctatgagaaatacaaaaatcagtcggatgtagtggcacacacctgtagccccagctactcaggaggctgaggtggaagaatcacctgagcccaaggaggttgaggctgctgtgagctgagatcacgccatagcactccagcctgggtaacagagcaagatcctgtctcaaaacaaacaaatgaacaaaaaacaaaaagacagctgatagttattgctcctttgagccgaaacctgggcgcgccaggccaccagggcagccagctgttggtgttttccactgtgggcttgtcacagggggagctaaaaatctgtgtggtttgtctttgtgtgtttgtgtgaaggttcaagaagacgtggaagctgcgggctctgaaggaaggcaagacaagcatgcatccgccgtactctttggggcagctggtcccggagaggcctcgacccaccccagtgcttgttcctctcatctccccaccggtgtcccccagcagcctggggtctgacaatacctcgagccacaaccgaccagatgccagggacccacggagcccttatgacatcagcaatacagactacttcttccccagatagctggctgggtggcaccagcagcctggaccctgtggatgataaaacacaaacgggctcagcaaaagatgcttctcactgccatgccagcttatctcaggggtgtgcggcctttggcttcacggaagagccttgcggaaggttctacgccaggggaaaatcagcctgctccagctgttcagctggttgaggtttcaaacctccctttccaaatgcccagcttaaaggggctagagtgaacttgggccactgtgaagagaaccatatcaagactctttggacactcacacggacactcaaaagctgggcaggttggtgggggcctcggtgtggagaagcggctggcagcccacccctcaacacctctgcacaagctgcaccctcaggcaggtgggatggatttccagccaaagcctcctccagccgccatgctcctggcccactgcatcgtttcatcttccaactcaaactcttaaaacccaagtgccttagcaaattctgtttttctaggcctggggacggcttttacttaaaccgccaaggctgggggaagaagctctctcctccctttcttccctacagttgaaaaacagctgagggtgagtgggtgaataatacagtatctcagggcctggtcgttttcaacagaattataattagttcctcattagcattttgctaaatgtgaatgatgatcctaggcatttgctgaatacagaggcaactgcattggctttgggttgcaggacctcaggtgagaagcagaggaaggagaggagaggggcacagggtctctaccatcccctgtagagtgggagctgagtgggggatcacagcctctgaaaaccaatgttctctcttctccacctcccacaaaggagagctagcagcagggagggcttctgccatttctgagatcaaaacggttttactgcagctttgtttgttgtcagctgaacctgggtaactagggaagataatattaaggaagacaatgtgaaaagaaaaatgagcctggcaagaatgtgtttaaacttggtttttaaaaaactgctgactgttttctcttgagagggtggaatatccaatattcgctgtgtcagcatagaagtaacttacttaggtgtgggggaagcaccataactttgtttagcccaaaaccaagtcaagtgaaaaaggaggaagagaaaaaatattttcctgccaggcatggtggcccacgcacttcgggaggtcgaggcaggaggatcacttgagtccagaagtttgagatcagcctgggcaatgtgataaaaccccatctctacaaaaagcataaaaattagccaagtgtggtagagtgtgcctgaagtcccagatacttggggggctgaggtgggaggatctcttgagcctgggaggtcaaggctgcagtgagccgagattgcaccactgcactccagcctgggtgacagagcaagtgagaccctgtctcaaaaaaagaaaaagaaaaagaaaaaatattttccctattagagaagagattgtggtttcattctgtattttgtttttgtcttaaaaagtggaaaaatagcctgcctcttctctactctagggaaaaaccagcgtgtgactactcccccaggtggttatggagagggtgtccggtccctgtcccagtgccgagaaggaagcctcccacgactgcccggcagggtcctagaaattccccaccctgaaagccctgagctttctgctatcaaagaggttttaaaaaaatcccatttaaaaaaaatcccttacctcggtgccttcctctttttatttagttccttgagttgattcagctctgcaagaattgaagcaggactaaatgtctagttgtaacaccatgattaaccacttcagctgacttttctgtccgagctttgaaaattcagtggtgttagtggttacccagttagctctcaagttatcagggtattccagagtggggatatgatttaaatcagccgtgtaaccatggacccaatatttaccagaccacaaaacttttctaatactctaccctcttagaaaaaccaccaccatcaccagacaggtgcgaaaggatgaaagtgaccatgttttgtttacggttttccaggtttaagctgttactgtcttcagtaagccgtgattttcattgctgggcttgtctgtagattttagaccctattgctgcttgaggcaactcatcttaggttggcaaaaaggcaggatggccgggcgcggtggctcacgcctgtaatcctagcactttgggaggccaaggtgggaggattgcttgagctcaggagtttgagaccaacctgggtaacatagtgagacaccatctctattatgaacaataacagttaagaaaaaaaaaggcaggcaggcggttatggtggttccctcccatcccaccacataaagtttctgagacttgagaacagcaaaatgctgttaaagggaaatattaagaatgagaatctgcagtaagggtgattctgtgcccacagttcttcaattctttataccgttttacccacatgtggtgttaccaaagccgggcagaaccatgctagcggaagatgtgaaatccagatagctcattattgccaagagctaggcagctttgatctccaaattgttattgctttcatttttattgtaatggaattgctttgttttgtttttttgtttttgtattgaagagggttgttttccctttatttttcataagctaatgtaaatgaagaaaaaatgtcttctctgggctgtaggcctggctcagcgtacacaggtatacatcctaagctctctatgttctctaatctgtggtgactgaacatgtgtctcaatgcacggggcatttctacctgtgtttctgcagcacccccactgccttgagtccccagcagtgctgttatttgcctaacacctgtagccatctgccacgcagccagacgtgaaacgctgagacagagaccatttaggttaaatacgacagcttatcctgctgggtggggaaagtaaaaaatatgctggttcaaggcctaaagtaaaatgatcaataatgtttgtagcattaatgaaatattttcaagaaatgtgtccaggggtagcactggctatgttgacgaggcctttggtaactcagagagctcttggccctgatggggacttgcccttacgctttctttatcaggctctgagttcacacggagcctctggcacttccctgctgtcttgggagaaaggaaactggttgccgcggcaggttgtggaatctgttgctggaaccaggctggaagcccacctggtagtgaacagggcccagtggggcaggctgggcatgttgtggtctatgggtttgtttcctggagaatgttcaggaatgtcttcccagctgctttggtgctgagctctattatctcacagcacgtccagaaggctaacccaggtggggaggatgctgacaccagctccaggtggagttggtggtcttaatttggagatgcaggggcaacctgtgaccctttgaggcaagagccctgcacccagctgtcccgtgcagccgtgggcaggggctgcacacggaggggcaggcgggccagttcagggtccgtgccaggccctcctcagtgccctgtgaaggcctcctgtcctccgtgcggctgggcaccagcaccagggagtttctatggcaaccttagtgattattaaggaacactgtcagttttatgaacatatgctcaaatgaaattctactttaggaggaaaggattggaacagcatgtcacaaggctgttaattaacagagagaccttattggatggagatcacatctgttaaatagaatacctcaactctacgttgttttcttggagataaataatagtttcaagtttttgtttgtttgttttacctaattacctgaaagcaaataccaaaggctgatgtctgtatatggggcaaagggtcagtatatttttcagtgtttttttttctaccagctattttgcatttaaagtgaacattgtgtttggaataaatactcttaaaaaata

SEQ ID NO: 46 - DNA, 59899 bp, Homo sapiens
actggggtggcgcgctacctctgcggagaaggatctgacagtgttccggagccggggcgagcagccaaaaggcccgcggagtcgcgctgggccgccccggcgcagctgaaccgggggccgcgcctgccaggccgacgggtctggcccagcctggcgccaaggggttcgtgcgctgtggagacgcggagggtcgaggcggcgcggcctgaggtgaggaggggccgggtgctgggtcgcgtagctggagttagagtgtcggtggtttcggacgggctatctggcactcgaggagacctcccttccccctgagagcagcgcccggaacttgtcagcccagcctggaaatccccacattccttccccttcctgctcccggacctccgaattctacttccacaactttgtcacctcgattatcgcagccctgagtacaaacttcacccaggcgcacgcacgcacccctcttaacgcccgccccgcagaacgcccttcaagaacaaacccccctttttgttaccagatcccacgtttttcccaatccccttttcatctcccctgaaattctattcgctccgcacttgtcttcattctcgaggtggatttcccttccccaaagccgttttttcatcttgaaatcgtaacgtttcagctttgttgaaagttcacaatgcttataaacactattaacgtttctttccttcttttgatcttttctattaataattatcattcctaacgaattccacatctcactgtatcccaaggagaacaaatcagtttttaaaattttacctcctccgacctaaacttttgaagatagtgcaggaagcaagggtctgttcttcagtggatgaacagcattttatttcataatccgaaactgaaaaaaaaaaaaaatcacaggttaaaaataagacgtcaccttttttttttttttttttttttgccttcagaaggaaacgcattttggcttagtttgtgaagtatttcaacaattatactgccttaaaataactagttattagaatgccagggtgaattttctgaaagattgtggtatttgcttttgacagtgctgtaaacaaaccctttaaactgtgtatgactgccagcttcaagttggaacaactcttaatttgaaattacggactcagatcatcagtttagctgtgtgccattatgttaatttcttaaattcatgttaattcctatttggaagtatttttgaactatgaactgaaatattacatttatagaaccaacttgctattaaattgtgctttccaactatttctctttagggataatcttgaacgtttgtttttaatcttgagtgaaagaaaaaaattacaggaaggagaaagtgtcaaaaaggacagactgtagtgggatttttttcttattttaagtatgtattgacaataccagtttaattttctcacaggcaatttagattattataaatactgctgccacctaatttaatataatatagtcttacgtaactaaaaatgttgttctcactcttatttgtgaattgcagtattttcaatttatttaaatttgtttccaaggctttgcacttcagttcagtgttagggcgaaagttaaatacatgtgaagtaggtgttaaaatgtcccctttatagagaaggaaacaggagtctcgctgaaaactagatctgtgtgactccaaatcctgtgctctgaatcattttgtcatgttgacacgtttctcataaaaaccccagtgccacaatttggtttgggaacttaagggcaacccataaatcctctacagtggcagggagggattccccgctccctcctttcagagctgctcattttaatgggagtcagaattctctggccctaatacatttgcagcttggctcctagagaagcatggaatgttctcacagcttctccgtttctttgattgcaaaggcagaatgatcagagttgaggttcctattgtgctttattattttacacagcaaatactaagcaattactacctgctgtacgaactcacaaaggtgcaggagatgtaatcaggaccttcaaagagtttataataattggattgacaaacttatacgaaaaaaactacaaggatgcaaagcagttttaattaaatgcagagtgatgcagaaaatcctgtagatattaaaattagggaatgatcgtttaaggattggagtgagcatttaaggattggaatgagcaaaggatttaccagaagttggccttgaaacctgggtaggatttggataaagggaaaaatgaagacagcccattaataatagcgaatggaggacaaaatgtagaatggagaatatagaacataatataggactagcttgtggaaaggatcagcagtaactaaggtctattaattaaaacaggcaatatatttagtgcttatgttgtgccagttgctgttttgagcactttgcccatattaaggcatttaatcttcataatattatgaagtaggtctaataataataggataaaatcctctttttacacatagggaaacccaggcacaagaaggttaattaatttgcccagctaagtggtagatctaaaggtcatacatagacagcctggcttcagaatctgacctcttaaccatgatacatcctgcgtctccatacagtacgcttgagcgacagcgagtagatagaaaataagatcataccagaaagtctataaaaacccacccttaattgtccaccaggtgcctcaaactatggtagattctgaggatatcaagatatgtgaaacaattactgtgcagtgttctgagtcctgttagggaatgatgtaagagtacactgacagcaaagatgtttgaagtggggggaaattccatataagagatgatacttcaaaagcagtttgtagtgcacagcagagtcaggaaagacattggaataatatatgtagaagcacagactgaaagaacaaggtatgttagaggaagtctagtggtttgctgagtctacagggatggttagtagggagtgatgaaagataagaccgaattataaatggcatggtgtggtcaagcaaaatgaggagcttaagtatttgctttgcagtttggaaactacaagaataatttcagcattattggagtaaaaaagccagattgcttgcaattgcaagcagttctctctagaagtatagtagtaaggtagcttgagggaggagtctgaggaaaggatttttttttttttttagaatagagaaacttgagtattggaaaagatagattggataggcacatcaaagccaaaattttaggttcttaaatagttagaatatttggcattattattcaccctttaaaaagctgttgaggagaagaatgacaggtttaaagttgtgttgtagagagagtgatccaccaacaatgttcagaatgcttggtggggaggaaagagactggaagcaggaacacagttgaaattattgaggtgatcaatgtccaaattaggttagtttgtggtagagagtaaaaagaagagatgggtgggaaagatattatgggagagaagacaggataagatttgtaactgagaaaagctaaaatgtactgcatagatgagagaaacgatggactccattgacttaggcagttgaagaggatgagttgtttgtagatagggaaaaatggtaagtccttgtgactttttaaaaagtgtgtgggcattcatcccattactgggcatatacccaaaggattataaatcatgctgctataaagacatacatgcacacgtatgtttattgcagcactattcacaatagcaaagacttggaaccaattcaaatgtccatcaatgatagactggattaagaaaatgtggcacatatacaccatggaatactatgcagccgtaaaaaaggatgagttcatgtcctttgtagggacatggatgaagctagaaaccatcattctgagcaaactgttgcaaggacagaaaaccaaacaccgcatgttctcactcataggtgagaattgaacaatgagaacgcttggacacagggtggagaacatcacacaccagggcctgtcatggggtagggggaggggggagggatagcattaggagatatacctaatgtaaatgactagttaacgggtgcagcacaccaacatggcacatgtatcatatgtaacctgcatgttgtgcacatgtaccctagaacttaaagtataataaacaaaaaaagtgggtgggcatttatgtgtatatgtgttcatgagcatgtacctatggtgtattgtttttagacctcttaaattgataagactcagagacagaatatctaagaagatgaaatgtaactggaattaaaagaaagatccaagccaaaattcttgaaattattttgtttgaaggtagtagttgaagtcatgtcttcaaagaagttggtatttaaaaagaaaagtcgatgcccagtactttatctttgggtaccttcatagcctggagataaaagctagcagagaattcagtaaaggagacaagaaagaggataaaggaaagaattcaactacattatctggttacatagaaaccaggatataggagaaattcaagaaccagggatggtcaacaatgtgaaaggcttcagaaacacttgtgatatatatagtcaaaatggctacagtctcttcttcttcttttttttttaaactttgcggctatctagtgtatcttagtaagatttaataagaaattagctgattgatcgtgaataagagagctacattggctgaaaaatggctatagtatatagatgattgttttaaagctgtgtgtatacatatccagagcaggagattcattcctttcagcactgtaaatctgttgccctgttacatttggaatgttctgcctccaaagtttcattttcttttaagcaatcagcttcaccctttgctctaaggttgattgatctgctcagtctttttttgtttggatgttctgttttatgtattacccccaaccccaccccctagtgcaaagtgagttaatcagagctatgtttcagatagcatagctctggttagactggcatgctctgggattttgtcattggtaatcttcacttgacaattagagtcaaagatgatgtagagttcatatgtgtgctattttctctatctaggaacccctacccttattttaagactgggcgctcctggcccctgtctgaattgggtattttctgtgctcctgtggcactttgtgcatattctgcatctctaaactttggacttcttaaaggcaagaactatttatatggcttcaattatgtttgtaacggaataaaaattgaataaaagcttgagcttttatttcttaagcaatggtgagaacatggatgttcatcaaagtgctctgtaaaccttttcatttggctaaaatagtctaattttaaaaggccctaaggtcataagcatattctatgtgtttttcaatatgcttataattttgcttttgcatttaggtccttaatctggagagagagtgtatgcttatacatgcatgtgcacgtgcatgagtgtgtgtctttttgtctgatgaaatggggttcttttttttcttttttgcttatggagccagttgtcccaatactatttattgaatagtcctttattttcccagcaaatgagcaaccttttaaaaaatcagatactaaattcttatatacacttgagtgtgttttgttttgtaccattgatttagttgtctattcatttgccaatcagtgctatgtttactttacctttagactgccctttttttttttttctgcgagactttttttttttttgagacagagcctcgcactgttacccaggctggagtacaatggcaagatcttggcttcttagcttgctgcagcctctataagcccaggctcaagtggttgtcccacctcagcttcctgagtagctgggattacaggcatggtccaccatgcccggctgatttttttttttattttttttttattttttatagagatggggttttgccatgttgcttaggctggtcttgaactcctgggctcaagcaatctacctacctcggcctcccaaagtgctgggattacagccgtgagccactgcacccagccttctgttacattttctaattagttattactggtatgtaggagagcttttttttttttttttggagatggagttttgctcttgttgcctgggctggagtgcagtggcgacatcccggctcactgcaacctccgcctactgggttcaagtgattctcctgcctcagcctcccaagtagctgagattacaggtgtgcgccaccactcccggctaattttgtattgttattagagacagggtttctctatgttggtcaggctggtctcgaactcccaacctcaggtgatctgcctatctcggcctcccaaagtgctgggattataggcgtgagccaccgcgccagctggagagctattttttgatgatgttttgtttgactgttatgttaaactctaaatagtcctattattttttgatgatgttttgtttgactactgtgttaaattctcaatagtcctaatagtttgtcatgtgattctcactctttcttgatagatgatcatatcattcacaatttattttccatttttagatcttatttattatatttttgcttaagccctttagagcagtggtgaataactgatgacttcaagcatcttgtctgaatcttgacattaataggaacgcttctaatttttacctttaaacctatagatgcttattataggtttctttcttccttttttttttttttttggaggcagagcctcactctgtcgcccaggctggagtgcagtggtgcattctcggctcactgcaacctctgcctcccgggttcgagcaattcttctgcctcagcctcccaagtagctgggactataggtgcccaccaccacgaccagctaattttcatatttttagtagagacagcgtttcaccatattggccaggctggtctcaaactcctgaccttgtgatccacctgcctcggcctcccaaagtgctgggattacaggcgtaagccaccatgcctggccttgtaggtttcttatagtagtacctgtggcagcaacagcaagagctgcactaataataacagctgttaaccttttattgagtagttacaatgagccaaatgattctaagcactttatgtataatgagttatttaatcatcataacattcctagatgggtaggtggtggtggtaccccatgtttacagataaaggaagtaaaagtgaaggctatttaaaaacttgcctaagatgttaaaatatagggactgaaatttgaacacaagcaatctggttctagagtccctgtatcatctttgttatccttcaccaaggtaaggatggtctctttcagtcttagttttctgacactttgttgttatttttaagttttagatgaacagttgttgaatgttatcagatgcttttcaaacatctgttggaatgaccctgtcattttcctttggtctgttaatatagtaattagcagtatcttttctcattttgaactgtgcttattttaggctaaatacttgttagcattcacactttggttttgttttcaaatctatttagacttttctctaaccatactacaaaaaaatgttaaaggcagtttttcaggcccaaggaaaatgataccagatggaaatacggatctatacaaaggaattaaaagctctagaaatggtaaccacacgagtaaatatgtgccagtctcactctgtcacccaggctggaatgcagtagtgcaaccacaactcactgcagcctcgacctccaaggctcaagcagtcctctcacctcagcctcctgagtagctgggacaacaggcatgcaccaccacagctgtctaactttttattttttgtagaggcgagagtcttactatattgcccaacctgatcttaaacttctgggcttaagtgatcctcctgccttggcctcccagagtgatgggatttcaggtgggagctaccaatgtgaagttttaatatatgcaaaagtaaaatatatgctaaaatagcacaaaggtctggggggagaaatggaagtatactattatatactatgcctgaggtgacataatattacttgaagatagattgtgaaaagttaaagatgtacactataaacctaaagcaaccaataagaaaacaaagaattatagcttattagctaacaaggaaaagagaataaaaaataattaagaaaaataaatgcagaaaagtaaacaggaacaaagaacagtcaagaagaaaacaaatatgaagctgatagctttaaacctaatcatatcacaaattatattaaatgtaaatggtctgaacacccaattggaaagcagagattatcagattggatacaaccacatgctgcctaccccctaaagatgccacttaaatatgaagaaacatacagattaaacaaaaaagaatgggagaggatatgtcatgataacactaatcaaagtaagacagaattggctatagtaatatcaaagtagatttcagagaatgttaccagtggtaaagaagggcatttcctaatgataaaagggtcaatttatcaaaaggatctaccaaataacatagtttcaaaacacaacagggtaaaaactgcaaggagaagtaaatccacagttatattcagggatttcaatatccctttttgaacaatgatagaagtagtagtcagaaaatcagtaaggatatggaagatttgaacactatcaaccaaattcacgtaatgaccatttatgtaacactctaccagcagcagcagtgctttttaagtgcacacagaatattgatttcaagatttataaggctaaagtcatcacgacagtgtggtggtagcatataaataagcaaattgatcagtggaacaaatagagtaggagtcatcctaccttctgttttcataaagtactgttagaacacagccacccctgtttgtttatgtattttctatggttgcttttgtgtcgtaacagtagattggtagctccaatagagaccttatggctcacaaacctagaatatttacctcctacctcatacatgaaaagcttgcccaccctggaattgagagtagccaaatagacccacacctgtgaacaactgatttttaagaaagacgcaaaggcaattcacttgagaaaggataattttttcagcaaatagttttgaaacaattatccgtatatacaaaatgaactcaaatttcagcttgacaccacacataaatattaacttgaaataactgagacctaaatgaccctaaaactataaaacttgtaggaaaaaacctttttgactttatttttattttttatatttttttttttttgagaaggagtctcattttgtcacccaggctggagtgcagtggtgctatctctgctcacttgcagcctcctctgcctcccgggttcaagcagttctcttgcctcagcttcctgtgtagctgggattacagatgtgcaccaccacacccggctaatttttaaaatattttagtagagacagggtttcaccatatacccaggctggtctcgaacttctgaactcaggtgatctacccacttcggcctcccaaagtgatgggattacaagtgtgagctactgcgtcgggccctttatgattttagattaagcaaagacttcttagatacatcaaaaacacaaattgatgaattgaactttattaaaattaaacctcctattcgtcaaaagatactgttaaaagaatgaaaagacaagcatacaagaaaataatgcgtaaatccattttctaataaaggccagaatatcttcttagaactttcaaaacttaatgagaaaacaggaaacccagttgatcaatatgtttgaacagacacatcatcaaagaagatatagccaagcacacacctgccgtagggcctagccattccactcttcacttaccttctattttggggacacacactatgtgttagtttcctaggggctactgtaatagagcatccctttgttacagtatcccttacctgaaatacttagtaacagaagtatattggattttggatttttttttttcagtttgtgttgtatttgcattatatacttaaagttaagcatcccaaatcctaaaatctgaaatccaaaatgccagagctcaaaacgttttggaattagagcatttcagtttttagatttgggatgttcaacctgtaccacaaattgggtggctcaaaacaacaaatttattctctcaaggttttggaggctagaagtccttttgagactttggatagaatcttcctttgcctctcctagcttctggtggtagccatcgtcgttgagattccttagcttacagctgcataactccaatctctgcctgtgtattcacatggtattcttcctggctctgtctctttaaagacaccagtcatattgtactaaaggcctattatactccactataacatccaattaaatctgcccatagagtaacattttgtgctactggggttaagacttcaacatattttttggggggaacagttcagcccataacaaacaaaaagaaaattaatttaattatattgtatttagaacaggggttggcaaactatagcccataagccaaatccagcttgcagccatttttataaataaagttgcatgggaatatacctatgcccacttatttacatattgtgtatggctgcttttgcactttaataacggagttaactaattgcaagagagaacttaaagcccacgaaatctaaaatatttattatctggccctttacagaaaatgtttgctagcctattttagaaggtgttaagtgttgtagaaaaaaaaaaaatcagtaaaggggtataagaaacacagggtggttagggaagatctctatgaggaggtgaatttgagcaaaggctacaaggaattactctctatatattaacttatgaagatgtccactatgtagtgttaagtgaaaaaggttataaaacatttctcacttacatgatcccatctttgtaaaatagaaaagtgtgtatatttatacaatgtaaagttatataatacatgtataaaaaattttgcaagaatatccaccaaaatgttcatggtagttatctcttggtgggattatagtgcactttcacatggcattttttcagtttcttttcattagacatttaaaaaatatttttataaatttaattccttatgtgttattaagttatatcaaaggcttaatgtgtatgaaacaataatggaagattcaactccttgcctaagtttgaagttacttgttgtatttcaaagaggagcactagtacttaagctagaatttaagtgaacaaatcttaaaatggatttttatctctggttacatagaatagttgttagcaggcttaatttagtgctagtagaagaagaaatatgtgattgttaaagaactccgtctgtcataaatgttcctgtcatgtttctgtgacattacatagacgtcagggaagtttgcattaggtgtgggtgagccaataatgtttgcaagcgtatatcaaatcatagcactagggctgggcgcggtggctcatgcctgtaatcccaacactttgggagtctgaggtgggcagatccctttgagctcagcctgggcaacatggcaaaacactatctgtactaaaaataaaaaaattagctaggcatgatggtgccatctctagtcccagctactcgggaggctgaggtgggagaattacctgagcctgggaagttcaagctgcagtgagctgtaattgtgctactgcactgcagcctggtgatgggagtgagacattgtctcaaaaaaaaaaaaaaaaagcactagaatatttgaatactcttatacaagtgtttatgggtttattttattctgaagctcagaacatatctaaagtaggatactttctgcaaacccaaaagcctaagagcagatggggatttttaaagtacacatataataaaattatcaaagccagccttctgaacaagactctcctctctttacagtgaaacccaatggaaaaagcatgacatttagaagtagaagacttagcttcaaatccctactccttcacttactaattttgtgatttgggtaagtaattgatcttgtctgaattttttgtttttttattttacaaagttccaataaataatccctgccctactcacctgattctttaggatattaggagactaaagtgaaataatttatgtgacaacattttgtgtaatgtaaaataatatcctagtgttaattgttatgaactcataattgatactaatggaagagaacagagtggataatttaaaaactaatttaataattagttaattttgtgtaggtattaccaacttctggcagtttattcacagtaacactgtactgtgaaagatatatagaaattttcttcatcttgatccccacgcaacttattaattcaacaagcattattttgccttctatttggcaattttagttcatatactgttctacaattgtaatagtaatgttaccatagtaacaaagtttatattgacattctttttcacatgcaatgtaaatctaaatatattcgtgctttttatttcatccttaggttaagttagaaaatgaaaaaaaaatcacaatccataggtgacaaaaataatttataaagagcctaaccattaaatatttatccattgtaactctactgctttttctctcacttgagaaaacatatggaaatgaaagtaaatgagaatgaacaactatagggataatcttgaatttattctattttaaataaatcatttatgaactttgtttctctaacattaaaagtagcaatacttgttatacatcatctagctcctttcggcacactaccatgttatatcaccatagttgaggaatgattacagcttttggttttcagaaataatctttcctgtatttatggttactagttaggttttggcttcatagaagcttctcaagttacctgcaaatttcaaggaaggttagtgtatgcaatgtatggttataatatatgcatagaaaactctgcaagaggtgaggtaatagtgctattaatataattttaaattaaatattagtatcaacagaaggaaaggagggaaaaaataagcaaactactgtcaattctgtcaatttttttttttatttttttgagatggagtctcgctctgtcacccaggctggagtgcaatggcacgatcttggctcgctgcaacctccgcctcccaggttcaagtgattctcctacctcagcctcctgagtagctgggactataggtgtgcgccaccatgcccggctaatttttgtatttttattagagacggggcttcatcatattggttaggctcgtcttgaactcctgaccttgtcatccgcctgccttggcttcccaaagtgctgggattacaggcatgagccaccgcacccggccataattctgtcaatttttaagcaagccccaagtgaagttaactgtattgcatataatattttatatagtgttactgtgtcttcatctcttagatttggactatgaaatcaagtcccataatagatgtttcttcatcacctctccattacaatcttttaaaaattaggaaagattactttctaaatgtgaaatgtggaatctacctttgcctagttcgctttgcttgtgttccatggtactactcaaacaaatctaattgctttgaagtaatcataaattctttcatggacctcttgttctggagcagctttgttgcaagaatatagtacatttggcttggcacagtggctcacacctgtaattccagcactttgggtggccaaagaaggaggattgcttcagaccaggagtttgggacctgcctgtgcaacatagtgagacccccatctttacagaaaaatttttaaaaaattagctgggcatgctggcaagctgttacatgattagggagtgcataaaatcaagttagtatgtatatttaataaaacaatattgtgttccaagtgcagaactaggaagccatttctcatcaagaagagttaatagttttatttagaagaaaaaaattacacattaagtattttgtctttaataattttagcttttattttaggttcagggagttcatgtacaggttacatgagtatattgtgtgatgctgaggtttggagtacgattgaactgtcacccagttggtgagcatagtacccaatagtttgaaccttaagtatttatttattttatttattttttgagacggagtttcactctgtcgcccagcctggagtgcagtggcgccatctccgttcactgcaacctccgcctcccgggttcaagtgattctcctgcctcagcctcccaagtagctgggattacaggtgcccaccaccacgcccagctactttttgtatttttagtatggacggggtttcaccatgtaggccaggctggtctggaactcctgacctcagatgatccacccacctcggcctccctgagtgctgggattacaggcgtgagccactgcacctagctgacattaagtattttttaatttaaatttattttttgcataagtactaaagattcacatggtcaacattgcaaggctgcagagtatatggtggagcgtctccctaccaccctgatctctcaaataccctgtcacagccagtatttgaacttttatcctcctagagatactgtgcatatataaaaaaacgaatgtgtgttttgttttcttgtatattgttttgcccacaaataatagcaaatgcgttgttctgtaccttaacaatgtaacaatgtattttagataactttatgtttctgtacatatagagcttcctcattttttttaaatggctacaagtatttacatttacatggttttggtataccatcatttaactagtgtcccatcataatcaggttgtttcagccttttactgttaaaaacaatgcagtgaataactttgtacatgtgttgttttattcatatctgtaggataaaataaagtagaatcattagaatcaaatgtgtgtgttttaattttgattgatattgccgaactggctctctgccttgtttgggtagagcttttttctttgtttttaagtgaggtctaatttacaaacaacaaaactgaccatttttaaagtgttcaatgtattgggaagcttatgccaatttacactataacctgtagtgtgtgacgatactttcgttgcttagtctcacaacaccctgttgatactttttgggtttttatatttttgccaacactaatatgtaagaatggtattgggataatttttggtttgtttaccttttgttacatactgcaaaacagaactcataagtgtacagctcagtgaatttatcactgtccagatcaagatacagaacatgctcagcacccagaatgtccccttttatacccttcctcacaaaaaacaactgctctgacctctgtcaccaaacaccgtagacttttgcctctttttgaacttctgtaaaataaatcatgcagagcgtactttcttgccttttttctcttttaaaatttttttgtagagtcagggtctcactattttgtgcaggctggcctcttaactcctggcctcaagcaattcttccccctcagcctcccaaagtgctgatatgacaggtgtgggccactgcacccaacctgtctgatttctttcattctgtattatatatgagattcatccatgatgcatgtatctgttgttatttttcattgctgtgattcaattacttgaatataccataatttatcctagtgttaatagatatttggttgattttatttttcatctattttgaataaaacttctgtaaacattcttgtagatgtctttggaggtattaagcactcgtttcttttggttataccttatctgggcagattttgtttgttttaaggtctaatttataaacaataaaattcaccattttttagttacaacttgataggaaacccatgagtctaacatttctgcgtttcttatcagcaaaaaccctgatggctgccttttttctgaactttgttttgagacggagtctcgctctgtcacctaggctggagtgcagtggtgtgacctcggctcactgcagcctccgcctcccaggttcaagcagttctctgcctcagcctcctgagtagctgggattacaggcggccgccaccacgcctggctaatttttgtatttttattagggacagggtttcaccatgttggtcaggctggtcttgaactcctgacctcatgattcactcgcctcagcctcccaaagtgctgggattataggcgtgagccaccatgcccagccaacttaccttttaaagaatgttggaaggtagactctcagagccgtggagcaaaggacaggcttacttacagtcttcaaagatacagataatgtctccctctagagtaaatggcagacatgcttcctgcatatttttcaagtttagggttacttaagatctgtctttctttcctgtgaagcagcctgttcaggtgtcatctgacttcacaatgccctgtgacagttgggactcaagcagctggcgcaagaaaatgctgatactctgactactgttatgagtaatacagtcctttgcttctgacgcaaaaatgtcatgccttttgccagtatccatgacactgtggtaggctgacttgttagcttgaaagtaaggtaaaatctcagtgcctttgaaacagttgacacagaattcagtgaattttgacaaatgtagtctttttttttttttaaatagaatttcgctttgttgcccaggctggagtgcagtggtgccatctcagctcactgcagcccctgccttccgggttcaaacagctctcctgcctcaagcctcatgagtagctgggactgcaggcatacaccaccacacctggcgtgtgtgtgtgtgtgtgtgtctgtgtgtgtcggggtctcgctctgttgcccatgctggagtccagtggcatgatctgggcttactgcaacctctgtttcacgggttcaaacagttctcctgcctcagcctcccgagtagctggcatcacagacacccgccaccacgccaagctactttttgtatttttaatagagatggggtttcaccatgttggccaggctcgtctcgaactcctgacctcaagtgatctgcccacctcggcctcccaaagtgctgggattacaggcgtgagccatcgcgtcctgccaaatgtatagagtcttatagtcaccaccacaatcaagtcatagagtatttttatcaccccagatttcctttatgcccttttacgtgtgccttctctacctcagccctaggcaaccctggatctgctttctgtcaccttagttttgccgtatcaagaatttctgaggcacatgcctgtaatcccagtgctttgggaggctgaggcaggaggattgctcgagcccaggagtttgagacagcctgggcaacatagtgagacccccatctcttaaaaaaaaaaagaatttcctgtaaatagagttatacaatgtataacctgttgtgtctggcttcgtttattcagtgtaatgcttttgagattcattcatactactgcatgtatcaccagttcatactcttttttttttgtttgctgagtagtattctattatatgtctctaccattgtttgaatgtatgtttatacattcagcagttggtggacatttggattgtttccagtttgggacttatgaatgaagctgctgtgaacatttgagtataagtcttattgtgggcatatgtttttattttggggagtacgctctttggagtggaaataccaagtcttatggtgtgcttttaacttggtaacgaactatcaaattgtttaccagagtgtctgtatcattttgcgttcctatctgagtagttctaatttatatctctcattttgagtgaggttgaaagtatcttttcacatgcttgatttacttgtatttccttttctataaactattcaaatatgtttgcctgttctattaggtgttagaattttttagtgatttgtaggcattctttatatatcgggaaaatttttggccatgctatgaattacaaacatttttttccatttgtcaggtatcttttaaggatacatattatggtgagttttgccatgtagaaatttgtcagtctgaagttcttaatctcacagttatttactaatataagacttcacataagaaagaaacaagatatctcttttaattaaccttaaagtataaattatgttttctagcagtgttttccatagccataacttcagtgggaataaagaaaaataatgtgaagacttaagttttctacattctcataagaattttaccaccttttagaaacacagctacagcatggaaacaagattgtgtcttaaattatgtgtatataagagaaaaaatattaaaagtaatattacatgtgtctgttgcagaaatatccgcgcaagatgttgacgttgcagacttggctagtgcaagccttgtttattttcctcaccactgaatctacaggtaaggttcatgaaataccctatcttctaacttcacaaattaggtttatatatttttatattattatataattaagcttatgtttaattattatgttcatatattctttctaggataatcgagagaataatatcttaaattgattttaataaaaatattcttgataatctgtttttgtataatttgagttgtaacagtcatcttacatgctaagtcagtaatttaagtcagtaatcttaaatgctgtatatcaatactaacaataactttaaaatggggaaggaaagaagtgtgtgggtttttttttttttcttcagtaaatgaataggagaaaatttgttaaatcttgttaaattttacgtcattcatactacatgctcttcaggtattgaagggctgctttcctgtgtctgtaagtccttgtccccaaattacagttacccagatatctaatcattctataggatctggtttttaaccctgtgcatgctgattaccctactgattcttctcttagttgcctgtattacatttaaaatagaatactggctggacatggtggctcacacctgtaatcccagaaccttgggaggcataggcaggaaaataacttgagtccaggaattcagtctgggcaacaaagcaaggccccatctctacaatttttttttttaattagccaagtattagtccattctcacactgctataaagaaatacctgagactgggtaatttataaagaaaaggtttaattgattcacagttctgtaggctgtgcggaagcatggtggcatctgcttctggggaggctttgggaagtttccagtcatggcagaagacaaagggggagtgaggcatctcacatagcgagaacaggaggaagagagagagaaagggaaggtgctacaaacttttaaatgaccagagctcacaataactcattcctcatccaccatctcgaggcagtaccaagtgagaaatccacccctatgatttaatcacctctccaccaggccccacctccaacactggggattatgatacgacatgagatttgggtggggacacagattcaaaccatatcatgcctctagtcccaactactcaggaggctgagccaggagaatcatgagccctggacctcgaggtcacagtgagccatggtcacgccattgcactctatcctgggtaacagagcaagaccctgtctcgtaaaaatatttatgtgtacgtgtgtgtgtgtgtgtgtgtgtgtgtatgtgtgtgtgtgtgtgtgtatgaataatactatcccagctgtcccccttactagctgtaggaccttggtcagtcattttctgtacctcaatttcctgatctatgaaatggtgataataaaggccactacctcctagggttattagtgaggattaaagaagttaatatagaggccaggcatggtggctcatgccagtaatccaagcactttgggaggccgagatgggtggatcatttgaggttaggagttcaagactagcctggccaacatggtaaaaccccgtatctactaaaaatacaaaaattagccaggcggtagtgccgcacgcctgtaatccccactactcaggaggctgaggcaggagaatcgcttgagcctgggaggcggaggttgcagtgagccaagattgcaccactgcactccagtctgggtgacagagtgaaaccctgtttccaaaaaaaaaaatctgagcttggtagcacatgcctgaaagtctcagctacttgggaggctgaggtgggagagtcacttgaacccgggaggcaaaggttgcggtgtgtggagattgtgccactgcactccagcctagggtggcagactgagaccctatctcaaaaaacaaccaaaaataagttaatatagaggaaatatttggacagtgtttggcctacagtaagcattataaaaatgatagttactgcatatttattataaaggttattgttgtctttgaataaaagtttctttatgaaaaaaataaacgtaatataccaaaaccaatctgactacagtggcactcatacttactttgatctgaacatcatttttataaagttacgtaactatgtggtagctgagatatacccttgtttcatgttgagctagtgatcagtgaaaattctcaggtggtttttacatgagttactcttaaactagttctccctcacccaatgtatatttcttattacctaaataggatatatttcctctgttgctaatttcattttatcagttttagcctggtgttctactctttcagcataattttaaatcccaacattttcatccgaagtgttggcagttgtttgtagtcctgtcctctgctaatttgataagcatgtgtgtctgtcttttcccaagttgttgattaaaatgttgaaaataacaggactgcattagctacctgttgctgcctcacaaatactccaaatcttcaaggcttaaaatgataataatacctctcatgatttgtataggacaagactatagataggcaggcacaatcagacgtattcatctttgctgtacaatgtctggggcctcagctgcaatattcagactgggggctggagtcatcttcagactccttcgcttatatgtctgttgttaatggtatctgcaggctgagggctttgctggggccattgtccaaaacaccatacgtggcctctttttatggccctggctttcttacaatgtgtggctgggttctaagggcagatatcccgggagagagaaagaaagctaattggagtctgtattcttttaatgatctagcctctgaagtctcatagcacactccattggctggagtggacacaaggcacccatacagatctgatgtggttgggggaaatgcagtccccacctcttcatgaaaagagtatgcgtgacatcgtaagaaaaacgtgggatgggataaatatgtaggtgtggccattcttaaaatacagtcttctccaaggattgagggcatgcacttcagcatattctacttaagactatcctctaattgacttttttcttaagtcagtttttttatatatgggtaatcaaatataaatttgagtatgaacctataaaagtagcaaaatatcagcaatttcataatgttcattgtaatatcggttatagtatattctttttttttttgctttttttctttttttttgagatggaatctcgtttcgttgcctaggctggagtgcagtggcacaatctcagctcactgcaacctctgccccccaggttcaagcaattctcctgcctcagcctcctgagtagctggaattacaggtgcaggtcaccacgcccgggtaatttttgtatttttagtagagacgggatttcaccatgttggtcaggctggtctagaactcctcatctcaggtgatccatccacctcggcctcccaaagtgctgggattacagacgtgagtcactgcgtccaacccagttatagtgtattctaattcacatttcttcatcttgccctataaacattcaaaataactttatcagatacctttcttaattaaaatactttctttttacaatttaatctcagcctggtagccctgtaaaatgggattaatttgacatgggatggtattattgaagctgtgtctcactttgaaaaacggaacatttgccccttttttttcgagactgaatctcactctgtcgctcaggctggagtgcagtggtgtgatcttggctcactgcaagctccgcctcctgggttcacaccattctcctgcctcagcctcccaagtagctgggactacaggcgcccgccaccacgcccggctaattttttgtatttttagtagagacagggtttcactatgttagccacgatggccttgatctcctgacctcgtgatccacccacctcggcctcccaaagtgctgggattacaggtgtgagccactgcgcccagcccatttgcccatttttaatatttctcttattctgtgtgattaaaaattattcatactgagtctctaattatatctttttagaactctagagtatatttcatatttaacatccctatgattactttagagaaagtataacaagtgattttgccaaagaataaagtgatgtctagggaattgtaaggtctgacccagtatcagagagtaacttagtagagattctccactggatgaaggaccatgctattggaaattgagagtaatatatgcactaagatttacagtaggcatttataaataacagcaagatgatataaacagaccacattataagtttgaaacaaagaaatacacattccagctctgggttttacaggctttgtgagaggtcctgggattccatttggggatacaattttgactgcaaaaactgtttttaattttttctgggctcactgcagccttgacctcttgggctcaagcaatcctcctgcctcagcacacgaccctcacccccaagtagctgggactacaggcgtgtgccaccatgcctggctaatatttatattttttttgtagagatggggttttgccatgttgcccaggctagtaatttttaatctcaaaaacacttcatgggtaactacccaggaaccccacagcaaataggattcattgaggaaagccaccttaaaattgtggacattgaagctagagaaaaagaataaaatcatgtcaaatagttgggacttttatcttggtagtaggtagccactaaataatttaaagtagacaaatgtcctaattattttagaacagtaactgacagtagtatgtaagataaactggaaggaggtcagactgatatagtatcctgtgcttcagcagtcaaagtagcattggaaagaagatgttgatatgcttattaagcatatagaaccaatacagtgcactattgttaagttggaggttagaggaggctaattggagatgttggaagatgactacagagtatctgtcctggatgtctggatgggagtggtgctgttagcagaggcagagaaataagaataaaaaataataagtttgaaaagattatgatacataatagttttggacatgctcatttaaaaatagctatgggatatctcaggtagatatatgtctaatgggctattgaaagcatgggggtttagtgctagagatagggattgagatgtcatcaatgtggagtaggtgataggtaaagcatgtagttgtgtttaattctcttttacccaatctgattctttgtgttttgttttgtttgttttgttttgttttgttttttgagactctgtctcactctgtctcccaagctggagtgcagtggcgtgatctcactgcaacctccacttcctgggttcaggtgattctcatgcctcagcctcccaagcagctgggattacaggtgcccaccatgacacccagctaatttttgtatttttagtagagactgggttttagcatgttggttaggctgattctttgtttttaaataggggatcctatcccatgcatttattttcactctgttgtccagggtggagtgcagtggcttactacatccttgaccccttgggctcaagccatcatcccacttcagcctcccgaatagctgggactataggcgtgcaccaccatgctcggctaattttttttgtttttagtacagatggcatctccctatgttgcccaagctggtttcaaactcctgagctcgagcgatcctcttgcctcggcctcccaaaagtgctgagattatagacgcaaaccatcatacccagggccatgcatttattcttaaaactaaactatttggccatcttgttctattcttcctgttttgtattggtcccttgctgtttcctttgttgtctgagttttgatgtgtggacaatgtatactgtctgtgaccccaactgtactccacaacagcattcaggactgtagaggagaccaccactgcctgttttctggagagtttagtttagacctgggatctaaatggagggacaggatacgttgtggggcaagtatgaatcatgctgcaggcagtctgtgtttcttaaagaaatagtttataccatgggctataaagcatgaatgggtttttcttaattcagctctattatctttataatttgtatatttctttacaaattcaggcattaaattctaaccatattaattttcagttgtgtattgtctttttctgtgtctttagggatattttagtgacggttgagggactctacattgagtgctaccagctagatatcattttgtaccagaaaaattcagtccatttatatattttctattgttcctttttaggtgaacttctagatccatgtggttatatcagtcctgaatctccagttgtacaacttcattctaatttcactgcagtttgtgtgctaaaggaaaaatgtatggattattttcatgtaaatgctaattacattgtctggaaaacaaaccattttactattcctaaggagcaatatactatcataaacagaacagcatccagtgtcacctttacagatatagcttcattaaatattcagctcacttgcaacattcttacattcggacagcttgaacagaatgtttatggaatcacaataatttcaggctgtaagttttgtttttgtcttatttcagactttgtcatgactattgaactgcatttttaatgttgtcctttcatctttataaaatgtagtaacttgtggacttagtgacttggacatgtttggtttttaaaaaataagcttagaagtaggaaccacaagtctcctgtctttcctgaaagtcaagcagtttcactttactagagaaatatttgacatgagaccccccccaccacaggaaagtattgttgaattgacataatgatggtaattctcagtatcccttaattgctgagaaaatgcacgtgtaaagcagctacctgaagaaagcgaacaaatactggagtaaatcctttttttttttttggtgacagagtctcgctctgtcacccaggctggagtgcagtggcatcatctcagctcactgccctcccgggttcaagcaatcctcctgcctcagcctcccaagtagctgggactacaggcatgagccaccacgcccggctaatttttcatatttttagtagaaatggggtttcgccatgttggccaggctggtctcaaactcctgacctcaggtgatccacttgcctcgggctcccaaactgctgggattacaggcgtgagccactgtgcctggccttggagtaacaaagtaaacaaaataaacttactatgatccaaaagtgggttatctaatttgtggatcacccagactttactgttttggcatttgcttttcttccaacgagtttgggaaagcaataagaagagaaatataaatgaatcattttggcttctacttagttgcctcttacaaacatatgtatatattacttttaaaaatatacttaatggagaaatcagttgatatttttttccagttataaatgaaagttgattttacatagaaaattaatgtgaaacaaaccagttgatgacagttaggatggatgtatatatattacttcctgaaaagaagtgtaagagttgggatagaaaagaaattgtcatcagcctttcattgtgtccatactttttgcttgggtttgatttttttcatctaatttagatcgcaaatgccttgggtagtatataaattgcataatatttgtggatataaagctttctgaaagatgctaattaatcccttttagtgcctccagaaaaacctaaaaatttgagttgcattgtgaacgaggggaagaaaatgaggtgtgagtgggatggtggaagggaaacacacttggagacaaacttcactttaaaatctgaatggtacgttattttaaatttgtttcatgttagatttattaaagttagtcatttttgctggaatttttattttaccaagtaataatattaaatgctattttaaaacatttaattttttattctgtaacatttcaaatatatgtaaaagtagaggccaggcgcggtggctcatgcctgtaatcccccaggcgcggcggcccatgcctgtaactccagcacttacggaggctgaggtgggcagataacttgaggtcaggagttcgagaccagcctggccaaccagagcaaaaccctgtctctaccaaaactacaaaaattagccaggcatggtggcgggtgcctgtaatcccagtgactcggaggttgaggcaggagaatcacttaaatccaggaggcggaggttgcagtgagcccggattgcaccactacactccagcctgggtaacagagtgagactccatctcaaaaaaaataaataaataaaaaataaaagtagaaagaatagtagaatacccatacatacccatcactcagcttcaacactggtcagctcatgaccagtcttatttcaaaggtactctttgcctatattgtcttgaagagagaatcgcgggcatcatatttcatccaaagatatttcagtatgcgtctctaaaagatgaggacattttaaaaaaaagcataacaacataccactgttacactcagatataaaatattacattttcagttagtgttgatttcccctatgtctcatgaatatgcctatatgtataattttttttacatttgtttcagtcaagattcgaataagctccatactttgtgaatttatgtcttgtctcttaaattataggttctatttgttcttttttcttacatttcagttgttaaactgttatacattgtacattgtttaacatattcccttgtctttttttttttttttttttttttttttttttttttgagatggagtcttgctctgtcacctaggctggagtacagtggcatgatctctgctcactgcaacctccgcttcccaggttcaagcaattctcctgcctcagcctcctgagtagctgggattacaggcatgtgccaccatgcccagctaatttttttctatttttaatagagagggtttcaccatgttggtcaggctggtcttgaactcctgacctcgtgatctggctgcctctgcctcccagagtgcttagatgatagacgtggccaccgcgcctggcccccttgtctttttctttccaaaaaattgcttttagatctacagatttcatcagatttgggtttgattttttttttttccccaaaaaaatattttgtaggagtgatgtgtacttctgtcaggaaagaccagataatgtttcactgtttttcttttttctgatactaagattgagcagtggtttcgggtgttgtcagccttattcctttatttactaagtttcccatttgttttttccaaacagaaaagttgaaagagttttacagtgaacactcttgcataccctagattctacaattaacattttactatctttgctttatcacctatttatctatgcatccttctctccatctctcaatctatctcttttttatgtatttcatagtgagttgcagtcattaatatacctcacccttaatcacttcagtatttcatagtgagttacagtcattaatatacctcattcttaatcacttcagtatttacatgaactagagttcagtattatgtttttaaataaaatttacatatagtgaaaacacaaatcttagtgtatcattcagtgagttttgacaagtacagacacctgtgtaactcaatcagtatcaagacatagaacatgactaacacacctaaaaagttccttcctgctccttcagtcaatcccagcaagtgccccaccccatgagcaactacctgtctgatattcttcaccatagattattttttcctgttacagaatgtctcatataaatgggattatatagtatatactcttctgtgaaaagttttataactcaacagaatgtttccgaaatttaatcatgttgttttcccactagtatttcccttacagctttgagcagtcatcagtgattataatttgtatataaattacaaaactatggtattctgtgttttgttttagctgaaatacttaaagaaaaacttgcctttatcaactgtggtttaccctgaagtacagttcagataggagaagcaagataggtttaatatttttccttaattaccagttttataattagttgattccctagtatcctccaaaggtagaataatgagggcttttctttctcattataaatttatatttaaacatatttgatatgttttaactcattatggattgtcccatctttgatcagtggcagtttactcaaattggctcattcatccttttttttttttttttttgagacagagttttgctcttttgaccaggctgtagtgaagtggcgtgatctcggctcactgcctcccgagtggctgggattataggcacccaccaccccgcccggctcattcatcgtcttgacacaacttccttagcctttgatagctctctgatataacatgcttttacagggtcatcatgtatttcctcacccagacctggaatcaaccttttcccaaaactctctggtttcatttagtgtgaaataatatttacagactacaatctgggtgctacaggaattcatcactactggtttgtcatagtttttagattttttagattttttcagtcgaaagagctaggacatgttttgtggtttgagatataatactatcttttaaaaatacaaattcatactgatattttcagtttaaaattagggctataggtttttacataattatatttacctgacgtctacatcttctttcttatgaactgaaaaacatagttgacaacaacactaacataattattcatttgctttatcctacggttaatacagcagctgcagaataataacaacagtattagcaccaacaaaatgattaccaagaatgattttaagattgtttttctctgtgaaggatgtgtaatagtcagattactgtgttttaatgttacttggaatagttcttttctatgtggttatactacatactcagtacacaagttcatatgtttcattttgcttttaatttttaggaatttttcttaataattatataaaacaatccaaaaagtcaaatctattaatagtattaaggcttgttcagaaaagtctatattctattcctgaatcctctaccttatttccttctccttagaggctaaccatttttgttttggttcaatttggggtttggtttatcctatttttaaaaacagtgttgtatatgaatatttttaattgaggcataatttatataattgtaaataaatatagtaatattacttgaaactttccatggtgatagaaatcagaaagtagttgcctaagtttgactagaaagaggctaagagattttagccctaagactaaaggctaaggggtaatagaaattcttacccctaacctcctgtcaccttctagcatattgtgcttaaagaaatttgtggtacagtaagggttctgttttaggaaaaagaaaaaacagcactgggatcacaaggaaatagataatttttggagaggagtaagtggggatggagcataaaattttaaagcacaatatttttagactacaaatttgaaaataattttatgttttaagatatagatcaaagttaattttaaagaaaggtttatttttaagaaattttgttagtgaccagcagttatattgcaaagtttgctacaacaatctaggtctcatcaaactctttgcaagtaatttttttcactctaattttttcagatgtgtttttaatgactgattcttcaattttttgtatttagggcaacacacaagtttgctgattgcaaagcaaaacgtgacacccccacctcatgcactgttgattattctactgtgtattttgtcaacattgaagtctgggtagaagcagagaatgcccttgggaaggttacatcagatcatatcaattttgatcctgtatataaaggtagttataaacctgaatttgagagtttatttgacactgtagtcgtttacaaattaaagtagtttttatatttagattttttaagattttaatgtagatttttagattttaattaatgtagtttttagattttacttttttagattttaattaatgtagattttagattttaattaatgtagaaacaagcatttatcttagtgatttttatgaagtcattttatcaataatatcaaatagaatttggaaaaagaaaaatatccataatccaaccacacttaacagctgttttcactttgaatgttttctgttctcaaacatcttacaccattgtaattacagtatgtatgttccatttttattcttttttaaaaatttgatatcataaatatttgtcttttgacatatgaacctgaagagattaacaaatgtaaattaacaaggagaactgaagattctttagaaatctttttttttccattataaggtatatagcatagcataattttcagagaaattagttcatttggtaaggataaattattgtaaaataaaggaaggacaatataaagagtatatttgagtttgtatatgaaattggaaaacataataaaccttaggatttattttatttttcagtgaagcccaatccgccacataatttatcagtgatcaactcagaggaactgtctagtatcttaaaattgacatggaccaacccaagtattaagagtgttataatactaaaatataacattcaatataggaccaaagatgcctcaacttggagccaggtaaattgaaagttaccgtttattcaaatagtccttctttcaaccctctaatcttaaaaagtttcagtcattttctaaatgtctttaagtttctggttatgtgaaatattttgcttgataacctcttctgggttgttatttcaaacaaggggaatcaggaagatatccagatagaaaatacagctttgctaaatacagtagcctttaagtaaaacatgaaaatgatatagggtgataggaaatggcttttttttttttttcttctagagacagggtctccatttgcccaggccgctggctcactgcaattttgaactcgagcttaagtgatcctcctgccttagtctcactacaggtgtgcaccaccacacctggctttttaaaattattattattttttgtggagatggagtctcgccgtgttgcccaggatggtctcaaactcctggccttaagcgattctcctaccttggcctcccaaaatgctgggattacagatgtgagctaccactaccagcctagaaatggcatttttgatgggtgttacaaagaatacaagtaataaagcaaattaagtagaggagcaaaaataaagagattataaggataaggtagctagtgtagggattggtgtgctgcagtccaccaaaatcagcctgtgacttgtttttgtaaataaagttttactggaacacagccacactcatttctttacatattgtctctattctacagtggaagagttgagtagttgcaaaaagagtctctggcccacaagcctaaaatattagtaaatattttatctacctttttatagaaagtttgccaaccactgaggtagaggaagggattgatagggagcttgtaagactgaaaatgatagtatacccaaagatgatgctaccagcaaaagaaatacttggagcttttaaaaaggctatcaccatagcattcagctatccatactcttctctgttttgattccatttatcacaaacagtatgtctttgcttttgttgctctggtcacagtgagcttgttagggaattgggctaatgactttactacttctctccttaccccacttatctaaagtgctcagaatacaatcagaaaaagcaataaaacaaaattggattaatgcttcatgttgtacagagaatatacatacctgaagttcttcaaaatgtggtattaagtatagaatcttaattcagtgctacaaaaaagactgatgtttattttgtatctaatactaaattatcagagtaatatgaccagttatttatctgtatttaatctcctctttttttctgaaagccaagtttaaaagccaggaaaacttttgtttttcttgattgggctggatatcttccttttgcctgtccacatctacgctctacccttctctttgttgtgtcatgctgacctgtatagatttcatctgtgggtttccattctttctagcttccttgtgactgtggttaatggaaggaagggactaggcaggagagaagacagaagaaaagtgaaattggcatgttgattttccctgcttccttccaggaactggctgtctttttttttttttttgagatggagtttagctcttgttgcccaggctggagtgtaatggcatgatcttggcttactgcaacttccacctccctagttcaagcgattcttctgcctcagactcccgagtagctgggattacaggtgtgtgccaccatgcccagctaatttttgtgtttttagtagagatggggtttcaccatgttggccaggttggtctcgaactccagacctcaggtgatccacctacttcagtctcccaaagtgctgggattacaagcgtgagccaccgcacccagccggctgtctttcaacttagggtcactacctgtcaagacagccctctctagctgaccggcttctttcaggttctggtacttcccctcatccctttgggcctagaggtagaaacagctctaagccccagagtactaactgcactgtctaaggattccatatactctgcatgtagtccctttatgaagccctccttgaattattctaaatggagtgtgccatctgtttcctgcagaaatcctaagttatattacaggccctgtggaagaaataaagggaaaaaaggaaagataatagatgtttccatacttctaaaaccaaataactttactgatttggactgctttttaacttacacttatttctctccagaggttgagtttaatgtattagtcttgtgtcaataaaatagtttcaagaggctgaggcaatagaatcacttgaacctgggaggcggaggttgcagtgagctgagatcgcgccattgcaccattgagctccagcctgggcgacagagggagactctgtctcaaaaataaatagtttctaggctgagcgcagtggctcacatctgtaatcctggcactttgggaggccgaggcaagtggattgcttgaggtcaggagttacagaccagcccggccaacatggtgaatcttgttgatactaaaaaagtacagaaattagctgagagtggtggcgggcacctgtaatcccagccactcaggaggctgaggcaggagaatcgcttgaacctgggagaggtagaggttgtgttgagccaagatcgcaccactgcactccaacctgggcaacagagcaaggctgtgcctcaaaaaaaaaagtttctgaattttaacacaatttagaagaccttactaattgaggttttctgttgtttggtttgctttgtttcagattcctcctgaagacacagcatccacccgatcttcattcactgtccaagaccttaaaccttttacagaatatgtgtttaggattcgctgtatgaaggaagatggtaagggatactggagtgactggagtgaagaagcaagtgggatcacctatgaagatagtaagtacataagtatatgaagaagtaaagctattggaattccagatgtgaactggttctggttttaataatatagcctcattgcttcttagtttgtgatcattttattcaaactgcagtattttaacgttttaatttttaaggacattaagatgtaaaattgaatatggatcattgatagtataagtctatttgatacctaattaaattatcatggaggccagatgcggtggctcacacctgtaatcccagtactttgggaggccgaggtgggcggatcacaaggtcaggagtttgagaccagcctggccaatatggtgaaaccccttctctattaaaaatacaaaaattagccgggcgtggtggtgggcgcctgtagtcccagctactcgggaggctgaggcaggagaatcgcttgaacccaggaggtggaggttgcagtgagccaaggtcacgccactgcacttcagcctgggtgacagaacgagactccgtctcaaaaaaaaaaaaaattcatcatggaatggtgacttagatacatctatcagaaaaccgttaactgttgataagtctagaacattttattcaaggagacttgtccagagatactcctaactagagaatcatatcctgaatcattaaaaccacactgtctagcaaactacaccttagatccccactatcaaaaatatacttgtattataccttttattcattttttttctaatagcacttgataagcccctgggaagcggttgatcctggaattttggttggttagtttttattttccttttttctcctatagataatatatatgatatagaataaaaaaggcacaaaaagagtgtacagtctaaagtaagatcctcactgcaaagcatctgatgttactaagttcaagaaataatcccgtggcatagatttttcattttgagaccttcctatcacagactcatctcttagttatcaatggcagtagctgtggctgaaaaaatcccctaccacctatatccctttacttccagctcttctagaggtttaggtcatgtgacttgagaacatcaaaggcagaaaagtacccttctgccctaagatttctctcataaatgctgagaaagaaatcaattttgctattgctgctgtgggagtcctcagccagattgctttgtcttgaccaggaattcttaaaatgagatacatggggaggagttcatgaaatagtttaaaatgtaggtaaaatattgtggttagtgcctgtgtgcatttttaatggacaagtgtacataatctttgtcaaatcaatgcgtgaatgaagtctctgggttccctttatgttaggaaatatttccagctcataatttttttttaataatttcatgttctttattctgtttgagtgctgcactgtactcatgtgaatttatctattttaacttctgtaccagcagcctttttcccagccttcctggtctgcctgtcctatcctttctgttttgctgtctgtaattgcctcttcatgattaacatatcagtacttaaatttttttttttttttttttggaaatagtgcctcactctattgcccaggctggagtgcagtggcatgaacacggctcgctgcagcctctacctccaaggctgaagcgatcctcatgcctcagcccccaacatagctgggactataggcacgtgtcaccatgcccagcaaatttttgtatttttttgtggagacaaggttttgtcatggtgcccaggctggtcttgaactactgaactgaagtgaaccacatccctcggcctcccaaagtgctgggatcgcaggcacgagccaccacacccagccttactgcttagattttattcaactcctgtcttattctactgactaccatatcttgttattatattcataaaaattttgagaaatcagttaatgccattgatttttttaagacaaactttttacaaaaagcttaacaatgataagtaaaaatgaaatgtcagttgatattacttattgctaaaaaattaaaaattatatgctacatttaatggctattataagttttgaaaaattaatactacaggtatttttaaaaccgaatttaattactggtatttaacaatttatgttttggctgggtatggtggccaaaccccagctacttgggttgctgaggtgggaggatcacctgagcctaggagctgaaggttatagtgcactatagtcatccactgcactccagcctgggcaacagagcgagacactgtctctggaaaaaaaccactatgttttatggattgctttttcagatggttagtgattatcacaacaatactgtgaatttgtttttattacatcccatcactctcaatcatccttatataaagtaataaacttattttagtacatttatcttaatttgttttattattcttgtgaatatttaggagtaagcaatgtgtttaaatagattttccagtttgattttcagcgataagtagtatcaacttatgtttatttcatttttattttttactgttaaaaactttattttaaaaagtttttttctttaaaaaatcatattaactaatttttcaaaatttttataaatataattagaagacctggtatttaatagaataagagaggagttgaataaaatctaagcagtgatgtgttgatcatgaagaggcaattacagatgacaaaacagaagtgaggacaggcagaccaggaaggctgggaaaaggctgctggtacaggagattcaagtagataaatacagtgccagcacacaaacagaataaagaacatgaagttataagaaagagtgatgcctctttagttgttgctcagaatacatttttacctttacaattttgaggttagaaaagagttccagtataattgatcaggctatcaccctgactaaaggaagagccaggtgttttgtgctgggttgggaaaatgctggtataaagaggtagagacaccatgcaattggagggcaagagtattaagaacaaagtaaaagaataatttgcagaattttattttactgttaaaacctttttattttaaggagtttatgtcttttctttaggaccatctaaagcaccaagtttctggtataaaatagatccatcccatactcaaggctacagaactgtacaactcgtgtggaaggtaaaaaatcacatttatattttatctcttataaatctttttttttttttttgaaaccgagtctcgctccattgccaggcaggagtgtagtggcgtgatcttggctcactgcaacctctgcctcccaggttcaagtgattctcctgcctcagcctcctgagtagctgggactacaggtgtgcgccaccacgccccgctaatttttgtatttttagcagagacagggtttcaccacggtggccaggatgatcttgatctcttgacctcatgttctgcctgcctcggcctcccaaagtactgggattacaggcatgagccaccgcgcccagcccttataaatacattttgtatggtattatgaatggaggtcttttaaatagataaatttttattcattttaatagcaaagcatttgattactatttttactaaatagaaaggtaatgctttatatgtattaatattatatagaagtcaggttcataaactacaaataataccttataggtatttaagtacagttctgtgaaagtataagttctataagaagaggaatgttgtttttgtactttggaattttccagagtaactcagaaaataataaaagtttgtgataatcaaaatgtatgctggtaagtgcatgagtagatcatactaaaaaagaaggtagaaaaatactcaagcataaaataaataatttagacctacatagccacagtgcagaattgatacagaaccaaaagctaacggaatgatgctacttacccttttttagttgaggtcatgcttttactcttcatttagtatgtactagttttattttagaaccaaatttaaaatggagattgtgaatcctttccagttaaatatttagagatttgacataatggcatgatttgtgaatatgaagaaaaactgattttttattcaagatttatgagattatttttaaaaataaactattttattacagacattgcctccttttgaagccaatggaaaaatcttggattatgaagtgactctcacaagatggaaatcacatttacaaaattacacagttaatgccacaaaactgacagtaaatctcacaaatgatcgctatctagcaaccctaacagtaagaaatcttgttggcaaatcagatgcagctgttttaactatccctgcctgtgactttcaaggtttgtatctgtgagatggagcctgactcttgggtggaaaaatggtggttaggtatggacagggctcccataaaaaacacaagttatctaagactgtctcctcagtatcagggataatcacttgtttattttttaattttttaaattttataaataatgattttctttttttcagagactgggtctcgccaggttgctcaggctggtctcgaactcctgagctcaagcgatctcccctggcctcccaaagtgctgggattaacaggcatatgccaccaaacccagctagtgatcgcatttttaggaatcagtcagcagacaaatttcatcaggatgcaagaacatttccatcactacatgctcacttaaacttcacagtaagctacttcattcatttaagcatattctgattacttacctggtttttaaaatattatttcaagattttgagaactttgtatacatatgactgaaacgtttatctgtagctttattcgtagctttcaaagaagaaaaattgcaattacaaaccgaaagcatttgaagaatttagggaaagcaaatttttttttttctttttgagacagtcttgctctgtcgcctaggctggagtgcaatggcacgatctcagcctctgcctcctggcttcaagcgattcttgtgcaccagcctcccaagtagctggaattaaaggcacgcaccacaatgcctggctaattttgtatttttagtagagacggggtttcaccgtgttggccaggctggtttcgaactcctgatgtcaagtgatccacctgccttggcctcgtaaaatgttggaattacaggaatgagccacagtgcccagcggggaagcaaaatctaagtttaaaaattgactactttacctgtaagttataataaagtgcttttaggcaaggaagtatatgctacaaaaattgataaatcacatgttttggaaatgactgtaaaatatggaaatttcaaatttgttaatatttattatttcaatattcaaactttgttttaaagctactcaccctgtaatggatcttaaagcattccccaaagataacatgctttgggtggaatggactactccaagggaatctgtaaagaaatatatacttgagtggtgtgtgttatcagataaagcaccctgtatcacagactggcaacaagaagatggtaccgtgcatcgcacctatttaagaggtatacctggctagaaacatctaaattgatatcctttttctaactctttaggcagctttttcttttgcttatagtgttttggtccgttgaaacgacttccaatttatcatagcctcactacttactagatgtgtgactttcagcaagtcatacttaacctctctgaattacagtctctttatgaacagagtggggttaatactttcttctttttgtaccccaatatgattttatcgtcaagggaaaactcctaaaactatagagtatagagaaatataagagtccaacctttgctgctgattagttatatgttctctgtacctcatccttcacatgagaaaatagtttcctagagcatctggatgacttgtgtaatgtcttagaaccatcagatagaggaagcagaactagaactcagatttccttatgtctttcaattggaagtagtaacaaaggacagaagtaatgaatcgtagcgctccagtctgtgtgttatggtgctgcttaagtggttataaagtgatacaacaactttgaagagaaaaaaactcagtttatagtcttttgttgataattaataattagaattcagctgtgaataatatggttaattagagaaaagccctaagcagagagattcctgccataaagtttttgagctttagtcataatacaggctgtttggacttacatgttattagtgtacagttttaataagcttggttatctagtttactgactttatcaaattaaaaacatggtggagcttaggaagtcctgaaacaggctggaaataactatagaaacttcttaaaaaaaaataaatacagggtctcactctgttgcctaggctagagtatggtggcatgatcatggctgactgcagccttcaactcccaggctgaagtgacccttctgcctcatcctctggagtatctgggactacaggcacatgctgccacactcagctaattttatttttttgtagagagggaatctcactgtgttgcaaaggctgatctccaacacctggcctcaagcgattcttttacctcaaactcccaaagtgctggtattacaggcgtgaaccactgctcagagccaatagaaactttttaaagcagcagccgatgcggtggctcacgcctgtaattccagcactttgggaggctgaggcgggcaaatcacctgaggtcgggagttcgagaccagcctgaccaatgtggataaactccgtctctactaaaacaaaatcagctaggcgtggtggcacatgcctgtaatcccagccatttgggaggctgaggctggagaatctcttgaacccgggaggcggaggttgcagtgagccaagatcatgccattgcactccagcctgaacaacaagaacgaaactccatctcaaaaaaaatagaagctagcataagttgtggagacattaagtttgggtaggtagtcgtatgttgctcagtaaccctgaaagcatcacattagagtagaatataaaaattgttcattttttggtaatattgaatcattaagaaaaggtaaaatctgtttaagaaggtaaaggagcatgtaacttcatgagtaatagttaaggaatatacattcttattgaaggtataaatttcaataaaacattttctaatatgtacagataatatactgtataaataagaaaaattttagtggtgcatgctaaaaaagataaaaataaaggaagtttgttttggtttttgtttttttgagacagagtctcactctgtcgcccaggctggagtgcagtggtgcgatctcggctcactgcaagctccgcctcctgggttcaagtgattctcctgccacagcctcccaagcatctgggactacaggtgcccaccaccatgcccagctaatttttgtattttcagtaaaggggggtttcaccatgttggccatgctggtctcaaactcctaacctcaagtgatcctcccaccttaacctcccaaagtgctgggattacagacgtgagccacagcgcctggccgaggaaattttttaagatacccttttttccaactcgcaaactaggaccgttagtgctttcccctaggtcttactgctttagtcgtcttgctccttaggctgttctctcttgtaggtaagacatacaaaaattgtcagactctataaaatccagagtaatttgagatcattgttttataaattctaaatgtaaataccatcattgttcttaacaatgtattttttatccactgcattggcaatacttttacagacagttttacctgattaagcttgaatccagtacacaaaagacaatgcttacttagaaaactgcagttttaaaagaaaattaagtggtcatgaaattataatgtaaaaataaattacggtattaacttgactttttcattatggaaaaacatgcttaatctgctattcttgctttagggaacttagcagagagcaaatgctatttgataacagttactccagtatatgctgatggaccaggaagccctgaatccataaaggcataccttaaacaagctcgtaagtccaaactcacttctttgaaaaaaaaagtttagggctttgtattaacagaaacattttatcgcttttaaataaagatgtatctcattatgttcaaatgattttatgacaaggaaattttactagattgtaaatgattttcagttagcaaatgtgttcactctgttacagcaccttccaaaggacctactgttcggacaaaaaaagtagggaaaaacgaagctgtcttagagtgggaccaacttcctgttgatgttcagaatggatttatcagaaattatactatattttatagaaccatcattggaaatgaaactggtaataaaactgtatcagttattaagaatcagttattttttccttaagcttttaagtactaatttaagtctgttcttcttatacatcttatagtatattggcctcaggagacacctgagaatttgccttatggttactttcatggatttattgaaaaagtattgtgttgtgctttagaacataaaattatgtcagaacattataaaagttgttttccaacaaaaatacttcgcttcttttttaacactttcacaatgccaaatataggccaaataagcaaaagcattgaatagttgaatgaagcacagttcttatttcttccagctgtgaatgtggattcttcccacacagaatatacattgtcctctttgactagtgacacattgtacatggtacgaatggcagcatacacagatgaaggtgggaaggatggtccagaattcacttttactaccccaaagtttggtaagaaataatgaagtttggttttttttctttctcaaacttaggttagaaatgaacttagtttatgtgctaaaattgtgttaaaaagtacatctttggattcatgatgatttttatattatctggctttggttggtggtttctttatagaaagtgttattcctcacctttttggtattttattaactgcttctgactatattcagctgtactaaaaatcctaaaagaatttgtgtatctttccatgtgggttcatttttttcactggtttgggtgtgttctttccttctctatcctcatttctttcttttattgagagattacttgaaggactagtccactttacagtcttcacttccgtacctcccactcagtatttaacatactgaaattaggggtcctaccccacccctgcactgaaacctctctggtgtcactcagaagacctcttgatcatcatatgtactgcatgctttttagttttcatcttttttctactttttttttttggaggcagggtcttactctgttgcccaggctacagtggagtgcaatggcatgaacatggcacactgcagccttgacctcctgggctcaagtgatcctcctacctcagtttctcaagtagctgggaccagtgccaccacatccagctaattttttttatagagatggctggtctcaaactcctgggctcaagtgatccttctgccttggcctcctaaagtgctgggattatagacataagccactgcctccagccttttctgcatttgactctgttggccttccatccttgaaactccctcctcccttgggttttctaaccatactttttctgctagcacagtctcctgagtctccttgttctttggtgttttcttcttcttctcctttttttgctttttttttttttttttttttttttgagacagagtctcgctctgtcacccaggctggagtgcagtggtgcgatctcagctcactgcaacctccacctcccaggttcaagtgattctcctacctcagcctcccacgtagctggggtagaggtgcccactaccatgcctggctaattttttgtatttttgtagagacggggtttcaccatgttggctgggatggtctcgacctcctgacctcaggtgatccacctgcctcggcctcccaaagtgctgggattacaggcatgagccaccgcacccggcctcttgaccctgttttcttacttgcctattcaaactctgtccatggctttagccatcttctctttccttcccaaatacattttccctccctcgttctatgccaaagccataaatttaaatgtgattacaataaatgtatttgtatatttttctctcacataagctgagtgtcaagtcctgttgattgtgcgtaccctttcatcatcattttcttcaactgcaagctcctcatgctaacttctcttttcttagtgcattgcccccagtgaggtcttcacctcatcatctggctcttctgtatcttccctaaagcaaacttaaccaacattctttcttgctccccctacattttgaatcattatagaaaattaccttattttaccataattgtaacccccacccccaagtgccagcctagttaatgataagtagtaaattccatgtgccttgttggttgaatgcttgctgaatgagggaataaatgaatgagtgactacataaaataaatgataaaagttcctgagctttgctgttagggtcagtaatgaatatagtttctgggataaggttggtcccatgtggtggtatgttaataggtatgttatttaaaataaaactttataccataatcttgagaaaaattaaaaaataaacttaaaaatgtatattttatgtatttctgtggagaccagccatctctacagagctttgtatatatgtatgtgtgtgtgtacacacacacataaaagcccatatgtatattttttgtttgtttgtttttgagacagagtcttgctctgtctcccaggctggagtgcagtggtgcagtcatagctcactgcaacctcaaattcctgggctcaagcaatcctcctgcctcagcctcccaagtaactaagactgctggtaggcaccaccatgcctggctagttaaaacaatttttttggtagagatgggatctcgctgtgttgcccaggctggttttgaactcctggcctcagtcctcctgccttagcctcccagagtgccggattacaggtatgagccaccatgctcagcctaaaatttttttattacataggtgttcattatagggaatttagactgtacagtaaaatgtagagaggaagaaaaattagtcctagtcccttaccccaaaataacatatttgtgtatccttttagtgtcttctttgtatatatttttttcctaaaattaaattatacttagtattattttataacctaccttttttcaattctctatctgtagtctcatggatccattatggcttcttcacatggcttgagtcttgccaacgaggaccttacagcttagttgaagaaattttgcataagtaaatcagaaaaaggagaacctgtggactatgtagacagtaaatagagtaggaatttaaatataccagtagtggataattttaccttcaaaggttttatgaagaagaaaatacttgagccttgagttagtatgtggacaaataggaagaaggtggcatcttagagagcagcatgagcaaaggcacaggcttgaaaacataaaagcagatgtttaataaagcaaagtttctgcctaaattagatttggcattttatatatatatacacacatacatacccatatcaatatatatatacacacatatatcaatatatacacacataaatatatatacatacacccatatatatatatatatgatgcttagcatttaagagttaatatttgccaacccatagtttattctcaagcatttaactgatttcttgatttctactgagcttcataggatgttagttacttacaaagggatatgtgtggtggaaggataaaattaagtgaatagtatatggctgcaatattactttcatacattttttactgtaaaagactaagtaaaattcaaaattaatcaggacagtcatttaaaaaatctccaatgttaattatcccaattagtgattaatttgatgaacaagtcctcttttaaatgcagatgaggatttgtgtggtatttagggatcttaggcttgtttactttttagtttattcctactcgtgccactcctcatgcccattgagcagctcctaaagttcttagccctgtaccagctatatcctccttttgaaaaatggtaaataactcttaaaacttctgagagttgcatttttattttttagaaggttaaatgtgtagttcaattatgtttttatagcttttccattttacccagtatttatatttgttctgacataatttctctgttatacagtattagaactcagagataaacttttactaagattctaccaaatgcagatcataaatgttacaaatggttatgtttgaaagctctaacccagtagattacccgatacactgatcatttttatcccccaaccaacatatattttatgctatgcggccaggttaatgtataagacataaatggttgggatgtgatttaccaaagagagaagagggtaaaaatcatcaagtctgaagagaccttgaaaaataattaggattgtattttatcttttcaacagtaagtctggttgggaagttgtattatgtcttcttagttcatatgtcaacattatttcccatcacacctctttttttttttttttttttttttttaagctcaaggagaaattgaagccatagtcgtgcctgtttgcttagcattcctattgacaactcttctgggagtgctgttctgctttaataagcgagacctgtaagtaactttattcatatttttgcattttcccccagctttattgagctgaatttacatgcaataaaatttatccattttaagtgtacagtttgatgaatttttgtaattacatacagatgtataactaccaccataatcacaatatagaacattttcatcacttttataaagcttccttgttctcctttgtaatctgtcttcttctcagcccaaccccaggcagtcattgatctgcttttctgtaactgtagttttgccttttctagaatttttatttatctatctattttgagacagagtttcactcttgttgcccaggatggagtgcagtggtgcgatctcagttcactacaacctctgcctccctggttcagactcctgcctcagccttcaaagtagctaggattacaggcgcccaccaccacacccagctaattttttgtatttttagtagagatggggtatcaccatgttggccaggctggtctcgaactcctgacctcaggggatccaccctcagcctcccaaagtgctgggattacaggtgtgagccacggccaagaattttatataaatagaatcacatagcgtgtagtcttttgcgtatgtcttttacataatatttttgagattcatccatgatgttgcatatacttctccctttttttttttttgagatggagtctcactctgttcccttactggagtacagtggcatgatcttggctcactgcaacctctacctcctgagttcaggtgattctcctgcctcagcctcttgagtaactgggattacaggcacttgccaccatgcccagctaatttttgtatttacagttgagacggagtttcatcatgttggccaggctggtctcgaactccggacctcaagtgatccacccaccttggcttcccaaaagtgctgggattacaggcatgagtcaccacacctggcctacctttttcctttttattgctgaacagtattctgtagtatggatatatcaaaacttagactgatctgttatggaagtttaggttgtttctaatttttagctattataaataatgttgctatgaatattcacatacaaaactgtgcgagcatatgttttcctttatcttgaacaaataataggagtgagagtgctgggtcatatggtaagtatatgttcaactttataagaaactgccaaactttttcagagtggctacaccatcttggattgcctccagcagtgttccatattatcaccaacacttagtgctgtcagacttctttcattctagtgggtgtgtagtactatatcgttttaattttcatttctccgatgactagtaatggatcttttcatgtgtcacttacatattttcttttgtgatgtgtctattgaaatcttttacccattttcaaattgggttattttgtttataattgagctataagagtgctttatatgttctggttacaacattgttaaatacgttttgcaaacttttgtcccagtctgtgctttgtttttttgtcttaactgtggctttagaaaagcagaagttttacgcctgtaatcccaccactttgggaggtcaaggcgggcggctcacaaggtcaggagattgaggccatcctggctaacacagtggctaacatctctactaaaaatacaaaaacttagccgggcatggtggcacacgtcagtaatcccagctactcgggaggctgaggcaggagaattgcttgaacccaggaggcatgggttgcagtgagccaagatcacatcactgcactccaacctgggtgacagagtgtctgaaaaaaaaaaaaaaaaaaaaaaaaaaaagcataagttttttattttgatgaagttcattttatcagttttttttctgtggttcctgagttttgtgtcctgccaaacacagtatcaaaatattttctcatgttttcttccataagttcaatagtttcagctcttagtctatgatccatttcaggttatttttgtgcatggtgtgaggtcagggtcaaggttcattttgttccttcagatgtctaattccattgtcatttattttgaaaagagtgtcttttccccattgaattgctttggtacctttgccaaaagcaattgtctttataagtctgtatctatttccatactctcacttctgtttcataaatgtatatatgtccgttcttatgccaataccacattgccttgatgagtatagctctatagtaaattttgaaaataggtagaattcttccagtgtgttctttttttaaagaagttattttggctaggttctttgccttttcatatacattttaattcagcttgtcaacttttttaaaactatagttttgattgggattttattgaatctataggtcagatttaattgaatctataggagagaactgcagtctttttttttttttttttttgatttaattcctcagctaaaacagcggaagaggtgatttattatatggttgttacactcggccacaaataaacacagaaatagtccagaatgtcacaggtccagggcagaggaccaacatgggcattttgtttttgagcaaggtgggtctcagaggtgatcggcgatcagagggcgatgaagttctagatccattgagacaagctctagacagtagcatgcagtcccacaacttgtaccagcatccccagcgtctggcattccatgtttctgctcctgtggcctccacggtgcaacaagctagcggtttacttggacctctgcctcatctttcttcttttgcgcttcagcctgcgcattcgcttcttcctccacttggctctcatggcgccgaggtttccaaaaaaatggcgctaaggccgagagagaactgcagtcttaacgctactgagtctttcaatccgtgaacctggtttatttctttatttatttgggttttgtttaatttacttttgcagtgttttgtagttttcagtagacaggccttgcataactttttttgaattcatgacaaaagtattttttgttattataaatgaaatgtttaaaaatattttctaattcttagtatatagaaatgcaattgattttttaaaatatattcatcatgtatactgagactttgataaattcatttattagtagctttttggatccttaggattttctagatacacaatcatgcttcttgggagtaattatagttgttctaatctttatgcttttagttctttttattgtcttaatgcactggctaagacctctagtacatatagtacatctagaccatataagagcattgctttgttcctaattttagaggtgaaagtatttagtctttcaccatcacatgtgatgttagctgtaggttgaagtttttgctttgtggggtttttttgttttgagactgagttctactcttgttgcccaggctggagtgcagtggcacaatcttggctcactgcaacccccaccttctgggttcaagcaattctcctgcctcagccacccgagtagctgggattacaggcatgcaccaccatgcctggctaatttttttgtatttttagtttagtagagatgggggtttcaccatgttggccaggctggtcttgaactcctgacctcaggtaatccacccacctcagcctcccaaagtgttgggattacaggtgtgagccaccgcgcccagccgctttgtgtttttttttcccctttactactacttgcaggggggaagttcttatttctgttttgccttgctagcaatttttatcatgaatgggtgtcacaatttggtcaaatgctttttctgaatctattgagatgatcatatggtttttctccttccttccatgaatatggtgcattttattgatttttcatataacatctttgcattccttggattttgctgcattcagtttaatactgtttgcatctgtgttcatgagtgaagttagtctgtctttatgtgccttatctgtctggttttaaaatcaggataatactggcctcataaaatgaatgggaacatgttacctcctctgttttctgaaagagtttgtatagtattaatacaattgtttccttttgcccagagttttgtgggaaggtttttaattaaaaattcaatttctttataaatatagctttctttttcttcaatctgttttggtaatttgtgtctttcaaggattcattcattggtttgtctaggttgtcagctttactactttttatattacttccaaatgttataggtatttcctacaggagagtcagtctggtaggctctcactctttgaagcaccattctcagtcacttttttaaatttgatttttatatttgaacttttttggtatcagtgggaacattaatttgttatctggattcttttaattggaataccacaacatgtggcctgggtaaagattttaagtggttttaattgcagaattttgagagtttaaaaaaaaatttgaacactgattagatttagctttgttaattcattatgaatacattataatccttatgcattttcaacagtatttttctattggttataagaaaaataatttttgtttggggtagagtaggtattttttgttcatttaggtaattggtttggtttgtaagagtctttgatgaacatgtttagaaatagggactatttattgtttattatgtgtggttttacataggccatttttcttttctcttcagaattaaaaaacacatctggcctaatgttccagatccttcaaagagtcatattgcccagtggtcacctcacactcctccaagggtaagagaaaatgcttctgagttgtttataatatacagacatgttagtaggtatattgagtatctacagttagtaggtatattgagtatctacaaatgtaccaaaagataagatattcaagctgaatcaaaaagtaaatgaagataaaacagtacataactgaaaattttaatcaaaatttaatatgtatgacatattttaggggttttatcaccatcatagtatatttgttctgatattttaaattgtttagtacacattacagatgtttggttgaacttgcaaactgaaaacttgaggtgctgaaactgctatgtgatggtaactacctcaagcattttgggttgagtattaaaaccaagttcaacagtttatcattttagcactgatgaaatgatctctgggaacctactctaaactctgaattttaaatatgccccaaaggggaactcatttatatttattatcctccggtagtccttaaattttatattaacagattaaaatgtattatgtatttttatattctacaaaatctctgtcattcaggtttgattttccttaatgttttctagttttctgtccagttaatcctaggctgcctagtctaggcatgaaatattaaatactacttgtagaccattagcttatcaaaatgtaacaccaacaatattgatttagactacttagactcattttatagtatctgcattttgggtagttgacagtgacttagtgacataatacaggttatttctgtaccactgagagttactgggaagtttcagagatgcattagctctgtggctttaactaatacttgccatatacaattttttctcttccttagcacaattttaattcaaaagatcaaatgtattcagatggcaatttcactgatgtaagtgttgtggaaatagaagcaaatgacaaaaagccttttccagaagatctgaaatcattggacctgttcaaaaaggaaaaaattaatactgaaggacacagcagtggtattggggggtcttcatgcatgtcatcttctaggccaagcatttctagcagtgatgaaaatgaatcttcacaaaacacttcgagcactgtccagtattctaccgtggtacacagtggctacagacaccaagttccgtcagtccaagtcttctcaagatccgagtctacccagcccttgttagattcagaggagcggccagaagatctacaattagtagatcatgtagatggcggtgatggtattttgcccaggcaacagtacttcaaacagaactgcagtcagcatgaatccagtccagatatttcacattttgaaaggtcaaagcaagtttcatcagtcaatgaggaagattttgttagacttaaacagcagatttcagatcatatttcacaatcctgtggatctgggcaaatgaaaatgtttcaggaagtttctgcagcagatgcttttggtccaggtactgagggacaagtagaaagatttgaaacagttggcatggaggctgcgactgatgaaggcatgcctaaaagttacttaccacagactgtacggcaaggcggctacatgcctcagtgaaggactagtagttcctgctacaacttcagcagtacctataaagtaaagctaaaatgattttatctgtgaattcagattttaaaaagtcttcactctctgaagatgatcatttgcccttaaggacaaaaatgaactgaagtttcacatgagctatttccattccagaatatctgggattctactttaagcactacataaactgactttatcctcagactagctgaatgattttgtgctgtttcaggatgtttgcactgaagaaaaacagaaagcttatctgaaatttataaaactttttgttttgctacatagaaaacagaaggtatttgaataataagcagtgatatgcttagtgagcacagctatactgattttgattagaatagtcatcagagtggcttagggacagttaatataaaagaggagcaaggtgtagaccatcatctacttctgctaaaataacttaaaaagaggtccataggccataactacatgagcccagcttttgtaatctgacaaaaaaatgaggagcagcttcgtgtatatcagtgtacacggtattccttaggtcccttccattggtagtgatgctgcgagttattactggagaaaaggaattctagagctttaacttggcagattaaaagtactcattttttattcatcaataattagtaatctcactagttttcaaaaatttgcatattattgacaacctctttgaagatgcatttcacaaactcaacagagtgccatgataagagctagggatcccccaaactatctcaagcatctaaaaaattgccatttttaaaggcttaaattgtagtagtaaaggggaaaacaggaagtagtagtaaaggggaaaaaaaaccaataaagcatctaaaaaattggcatgttaaaaggcttaaattgctaatgtgtgtatatatatatatatatatacacacacatatcattgacttttcttaagacttcagagtactgggtagatgaacactttatacagtatatatcttcagcttaaatttgttttgagtattttttttatttttaaataagtaggcaaagatttaaatttttttatttttagtaaatgtttgaggcacactaagacaacttgggcaatatttgccaaaacaaaacagaaccccaaaaaatgtacatcttgttcttagcaaatatcattattgtagagacacttaataaagagatggtattttaatgtctgcagttctgaggtagggtggaacttagttctacattgtgatttaggaatttttaaaaccttttttcttcaagggagaagtgacccaggcctcgagtttagtgctaaagccgctagtgtacttatgctgtcccctaaccaccacgtgcgatatggaagcagatgctaaatataggggttttcttagaaagtaagaggaaattagcaagcgttattagtgattgactactgctatcaagtgaattcaaaggaaacaggtttttatgccatatttaagttacagaaaccaggcatgcttagaatagtttctagaggttattggagaatagaaagctaagaaaacttggtatacatttacaatggaaatataattacactttttactctcagaatattgttcacattagacttcctgtttatcttttatattcttgcatttatataatgcctcatcctttcaaagttctttcacatattatatgatcttctttatgaaaaaaatagatgtttcattctgatatattcagtttcccactttaggcaaaagtagattaatagaatgacgaattcaaagtagatgaggaaaatcaggcacagagaagtaaaggtagggatagacccaaatttacacaacaagataatgacatctccagcttttaagttgatcatcaaaggctgggctggatttgtcttgctgtatgtgtcaggaaatttatacctattacattttccattttctcaaaatttaagtcacatgactaatatttagctgcaactttcctcataacaaatagtgtcatgaagaatgttgtagtgtgaagtttgtacatttcagggtcagatatacaatatgaactcttaatctacaggaatgagaatggaggatcattgaaggccatgatataaacaaatttgcatgttgaagcctgtataaaacatggtacagtgagtgaatatacccccatccccaagaacactttatacatattaaatggatatatgattactgtgcaaaaattcattctggaaatgaacatatatttgagcactaatatgtaatgtacacctgccctaaggagaaaataaattataaaactttttacattcaaaattactttcccaagcatgtcttagaataatctatgtgttgatgcatgtaaattgtactttaggtaggcaaagaaatctggttatttatgtaaaaactagtctaataaagttagttagtggctttatcactttaaatctttagtgtccaaaagtggtgtttaaagtaatagcacatcagaaaaccttgtctggacaaaactagttcactcactgcttctgcacctgcagttgctccctttagggttataaaataatgacccaaatgttacatgtgttgatattataacttgtcagttactgatgtctgtggtatcctaccctcatctctgaaagggataatactgaataattattagaaaactataaaacttcacactttgtaccattaaaacctaaaattttaatcttgtccttttttactatggatcagtcggcactcgggaacagcagcaaggaaaaaaagcaaatttcattcacatgttctgtgttcatacctcttctctacctaattgttcatttaaatttcagccttattccttgataagggattttaccacatgaagtcatccagtgaccctagctcttattgtgaagttagtggagtatacttagaaatgttacaactttaaaatgttacaaaacattcattaaagctcatatttaaagtagagcatctagtttgagaaatagaaatcaattattaaagatgtcttttttctacccatttaactagttaaaaccatgacatgtaaatgtagaagtagaataatcatagaattccctaaaatatttctgtttactaacatatattgaccaagtacatcaagcaggagagatcttccttcattctgttatagtccacatcattctaattttgctcagttgttattaagagcatattcctaaaccatacacttttgtttcaataaagttttattttgttgagatgaataaaataacaaagttataagctgcataagacaaaagttcaattgttcaaaaaaaatttactgggatagctttctattacaggtattgttagattatattgtgctgataagattactttctaaaaaatttgtacttttctgtaaattaaaagaatatggagtcataaaatggcaagtgttttaggattagcctaaaattggacattgtcattgatttcaaagaaggtatgaactagcagtcttacagcctaattcttctttggactggtccttggcagcagttccttttcagactcgataaacagaattcagatgatgtaagtcaaaacaaaactttacaaagccaagcgtattatcttttgcattaacctatttttttccatcatacatgctactagtatgtgcattagcatgatattctcatatacattgcattaaaaattaaaaggtggcagctcagggtgagctcttctgttgctcatttgttcctaaatttttaagggctttttctcagtcaatagtttgtacaaactggttagtttaacttcattacccatttcattaaagttgatgggtcgtgtgatgagatgcatttaaggccgatagtgatagatgttttttttatttcttgaacacaggctttgtctgaatgatgttcttttatctcttgaacacaagctttgaatgataactacaggttttaagtgctgttacattaataccataatgtgatgtgttagaaacaaagggatatttcaaaggtagatatttgaaaattctctagtctcaatatgtatgtgtattgaatatactctaaaaataaatgtgcaatttgctagtaggacaatgcagtgactgactagcattaggtatgtttcttttatatcctagctatgtcccactttcttctaagtgcaatcctttcatgttcacttgctgttttaccccatctactctaacttcatttggaaggcttgtctagagtatagcatgtatttttacctttgcagtgaattgcatgtgctaattgtaaccacagctatttttatgttgacataactccaaatgttatattaaatgttctattatatattagctctaatcccttaagtaaattttaagaaataaatacttgttcaaattttttttctgtatgtggttactatcatctgactatgcatatttgtaacagcatttatcattagtggtgttagctaaataagcatcttagtgtaaatgagatgcttcgtgtgggttttgtgacattttaaatgacataatggaatgtgatttaaaagaaaaccagtacactatcttggtcttaataacatagaatggagatggcaaatttatccactagttttccagatttactatttaatagctgaggtctgaaatcgtagcatcctccctcctagtggacattaaaaaaaaaaaaaaaaaaaaaaacctacttggttgtcaagagcccaagtatggaggtgctgcgccatcttgtggcctgtctgtgcccaccctgcactctgctggagtctccatccttgttgcagtgagacttgaagttcaagattgatacatggcatcctcctgctacttcttgaggttactaagtagtatatgaaactaatcagtcagcaagtccacctggaaggaaaagaaaatctcaactattaatgtgccttcacattgtgattttgtctaaaaaaatgtagtgagtcaaaaaacccacaagccagccaacagtaactccttcacatatataccagagtttatagaaataacatgtcagctttgggctatgtgctcctttgtttaaaatcttctatttggttatggcttgtataggctcaagcctgatttctttaaggtgtggtggctcatcttatcctaatgtgtatgatagatacagtccatcctgctttggaaaagattatgtaactccttgagagcatactctttctctagcccaaaggcagtgagagagttttcttgttcaggattgcttaactttccatttaagctttttctttttaaattaatacaaacttctacactttcaaaatacgaaatatattacaactgcgtataggctcttccatacttaagtccagtgcttgggcaagttaatggagtgaaagactacaagcaaagaggaactgaggtagaaaaagaagaatgtgtgaaagcagcaggaagctcagccaactcgaaagcagggtgaacagcttgagtcctgttgctgctgatcggggttggctcttggacaacttagtaagatcatggaaaggctgcttgggttctccatagaaaagttctgtctccatcaagggaggaaaatgtacctttcaactcaaaattcaatatttgtttttaaatatagctattttccccaaccgctaaagattttcaacagatacgaagccagagcttagttttagaaacctgtggacattcaaacctgattctttattccctgtgactatggttatgtcattttacatgtcaaaaaagtgtatctagaattgtcatttcttatttttgagctttttttagtgagaattatcccctcacttaaatggctttttatttaaacatctgtgcattctgtatgaaattgtagtctttctgggataacatggtgagctatatggtggtaatccacacacacaaaaataaaagccaaaaaaaaaccaaaa

SEQ ID NO: 47 - DNA, 21115 bp, Homo sapiens
ccgggccgcgcttcctctcgccaggcctgcgagcttcctcccagcggagccctgggcgagccgaggttggccgccgccgccgccgagcccgctgccgccctcccgctcctgccccacccgcgccttgcccgggggcttctgccggggtggggtccgagccgggcgaccgcccggctgcgccgccgtcggggccgtaacccggcccgccgtccctcccgccccagccagcctctggccgccggagcccgcggggcgtggagcgcgaggagccccgcggccccgatcgagcgtccggggcggcccccggcagccagcgcgacgttccaaaatcgaacctcagtggcggcgctcggaagcggaactctgccggggccgcgccggctacattgtttcctccccccgactccctcccgcccccttcccccgcctttcttccctccgcgacccgggccgtgcgtccgtccccctgcctctgcctggcggtccctcctcccctctccttgcacccatacctctttgtaccgcaccccctggggacccctgcgcccctcccctcccccctgaccgcatggaccgtcccgcaggccgctgatgccgcccgcggcgaggtggcccggaccgcagtgccccaagagaggtgagtgcctggccgtcccggagtgtcccctggagggaagagggtggaggtcgcgcgtctagtctctgttgctgccactgtcgcgtccactcccattcccctcttctcccacttctcccttctctcctttactcccttgcacgggttcgaattctcccaggagccactgtcagaacccaaattggaagggagtgcatgagggaggtactgccctgcagctccacggactcgtcttctcgggtcatcccgagtccccccctctgtggagctcagagtaggaggtggctggagtctggaggaagaggatccgtatgggccaggtccctagagagagtgctggactcccctgcccttccctgtacagggcctccccgcaggtgccctggcttgcttggttctgacccctccctcattaccccaccatgaccctgcgggctgcaagcaagcccagggcccagccacctcgggtgagcagttagaagcccaggtcctaggactgagcctgtcacccttggcctctcagaagaccaggcctaagccaagggatctttgggtgggaaactgggcaggccttctgcccggggggaggtaacggagcattagcaccatgcccccaccttctggcaccctgggcagcccattctcctaggctctttgtggcccagaccaggtgtcaggaaggggtgtgtccagccagcagattttttggagcttaactaccagttcacttccccgcccattttgtacacccgggaaccgaggctcaaagggagaagttgctaccccaggcctctagtggagttaggctggctgtcctttcatccccagctatacagggctggatggctgtgggtggaaggaaaccaggcaggcaccttcacccactggggacacaggcccccagcccggccccagagggaccttgttggttgagcacgtgcttccctgcagagggctggagggagtgaaagggcttccggctccagctgtggctgggtcagctagcaggagatgtggggaatgtgtggtgtatggccatctgtgtggtgtggcaggaaggtccggtcctggccccggctctgagttgaaacaacctggtggtcagtcctgacccagcactcgccacacctatggcccagctggcacaggagcagccaagttcaggatataaatggggtcacatgggaaccgtggaagctctgtctccactggcagcaggctacagactggggacatgggagcattgtgagagtggggacacccagggggcctgtttcaagctcctagtaccctggcggttccagtgtctttcttggttgtggccacagcaggaacagggcaaggacagcaggggtgaggttgaggcctggcaggatcctctggcccaggagagcaggcattgccctggtgggtgctgagcagtgtctgggctcccttggagctgctggcagttttgtcctgctgggtccctgctcacgatttagggtttttttgttttttcacttttttttctggctgtcctgacatgcacagtggaggggacccagatgtcctgggcctgtgagactcccctcacatggccccacacccagccctaacttcctttccagcctgagggactggggctggagcctgacatggttagctccctcccaccccagtcagcctttttaatttttattttattttattttatttttttaccaactgtgagctgtgaaggtgtgatccagggtcccagggcctttgaagaaaggagtctggcttctggctggcacgtgtgcagggatgtgcttttcattggtgagcttggtgccctccaccctctcagaagcagctgctcttctctctgcattgggtcaggggcaaggaaaaagcagaaaatgttcccattcaccaccgcaggggggccagaccccaaaaggctgagccacacagagtggccctcggcaagggttggaaatttcggggacagaatgcagcttcctccaaacaagtataggtaggggttgagacccaggatccacagtgtgacatggctgccccccaaagggggcagacccacctgggtgcggttctgggctccatcttttgaaggattttaaaaccttgacaggtcatcttcaaagagccagggatgttgactgagtctgggaaagagaaagtagggacagattctcatatgtctgagggactgtcccaaatgagaaaggcatcccatggcagaaattgtcccagacacgtgggccagagctagggagcaggtgggtcccagggaagtgaatctgagctcattatagggaaaccatgaatgtactcattttcttgatttagaaaataacaaaacagcgctacaggaaatttagaaaatgaaacaaaaatcacccactatttcttcagcaggcagtgactgtgttagcattttggagttcactgccagtcttttccccatccttttccttcattgtcgttgtcactggagtgtgtgtgccgtgacaccttttttcatttaatactgcgtctgtgggcattttctcatggtgctacgcggtctaagtaacgttgcttctaaaaagctacagaacattctaggctggcctgctgcagcgccatcacccatacactggagcgtgtgcatttttcccctctgttgctgttgtggttgtcgttactatgagtcccaaaagcagccagggtgttggagggcacaagcaacttggcacccaactgaatgtgggttccaggcccagacatgccacttaggcccagggtagagggaccttagacaggtcactgacctgctgagcctcgttgatataaataacaggatggtaacacctacttcagaggaaggtgtaaggacagtgtcaactaactaaccaagggactctaaagtgcctggcacagccctttcttcactccctctgtgagtaggattggcattgttgaaggagtgcccactgctggctgcctcaacctgtggggaaggtgcctgagccacgggccaatgttgactgaccactcacctggcaaagaggtggtctccgcctgaggagcccctgtgaaaccccctggccctgaggttctagaatactatggccagtgcccttgcctgccttcccttctccccattaccatatgattggctggcctaggacatggggctggccctgggaagatgggctgctggttagggtccgggacctgactccacccattccccttccggtctcccagcatcagagctaaatagacaaggcctcttctctctctctctctctcttttttttttttgtgtgtgtgtgtgtgtgtgtgtgtgtgtgagatggagttttgctcttgttgcccagtctggagtgcaatggcgcgatcttggctcaccacaacctccggctcccggtttaagcgattctcctgcctcagccttccaagttgggattagaggcatgtgccatcacgcctggctaattttgtatttttagtagcgatggggtttctccgtgttggtcaggctggtctcaaactcctgacctcaggtgatccacccacctcggcctcctgaagtgctgggattataggcgtgagccactgcgcctcttctgtaagagcctggctgcctcctgcctcccagctctggctaggtcagcccagcttggcattttcccagaggaaatagaggcctgcttagcctgagacttagacaaggaacccaggcatcctgagccccagcccaagaacagccatgccagcctcatcttcgcaccctgttccagtagccaaggaagggaaagaagctgggagattaagggtagggggattctggagcctcccagagcttcccaggagggagttggacacatcgggaaactcatgttagcctccccctcctcagcaggtgttccccaggtctaacctgagtgtgtatcactgtgacacacctgcttcctcttgttctacttttgtggagaccagggtaactgggagtgccctcctacagccaccccgtgggcagtagcaggacaccagtctcctcctggcaaccctgggcctaagagactgtagccccagatgaccctagggtggcccaggactaacctaaggaaggggtcctcccccaggtggcccattcagtgcagaggtcccttgggcacacgacttcagactccagctgccaaactttggcctgtggagtatctcctcctccctggtcttagtgtaagggaagtgggcatgacaactgccctcctgtcccacagcttgggatgggatgaggtcacagggtggggtccgccccaagatgctggcctggcctggctcagatgagagccctttgggtgtttctcagtttcccccgcccttggttggggacaggatgggtggaggagcaggccacccccaacgcccggcagggagcactgcctcccttccccctctcctctgggtcccttcatccaagggctggaaatagaatccgctaagtaatgattaaagtcaaattcagacctaaaaataaagagctggtgaaggaagagctggtgctccctgcatggctgaggggagaagtgagcagggagaggctggctttgggtggctgagcccctgctcctcgggatcagaagtactccaccagttgggggggtgctcttttatctgccatgatgtggcccattaagtgtagacggcaccactcagggcagactggcaggacccattagaaaaaaaatcccatttttcccatggggaaactgaggcccagaaaggagaagtggtttgtcaagcgactatttgagagctcccctcagcaggcccccagggactggagggccctgtgcagcccagcctgccctttctgcctgctcagtttctcttcctggttttgaggtgctaagatgaagtcagcttctcatcacacactagctgtgcacacaccctccaaccgcagcttccctccacccctccttctgtggtctgggcccagagtcgaaggaacaagtagaagagaggctgcttggtgcccccctggctgtcctgatcatggcatggttgtaagcctcgtgggcaggcgaaaacctgggcatcatctgccccccttggaccctggctgctgcttctcagcccagcctgacacctggtcctcatgcagactcgcgcatctatctatctgcagcttgtgctgtccgtgctgcagggagacaggagggaaggatgaagagcaaaccctgagagcgcctctgctggcgggtagaggagacgaggagtcagtgaggggaggcctgtggttctcacttcctggcagagctggtaggagctctgaagctggggctctgcgtgggctggggcagcctggagggcctcctggaggggaaggtcctgtgaaagttgagaagtgtttgaagaagaagcgtggtaggaggagaggtccttgtttgaagcttctgccctctctagggctgctggctcttttctgtgtgtccctcgacaggctcttggcctctctgagaggctggggtatgcagacaagcaagaagtgggcacagaagtacctctgcttcccagagcagaacagccaagctctgggcagacctcccctcggtgccccccacctgtccattttcagggtgtcgtctgtcctgcacaaggaaaggtgggaagaaaggtcccctaaccaaggttcagacaactctgagctcaagtacccacacagctagttcctcctctgtcagagatcaccagtccttgccctatggggtgtttgaaggattaagtaactaatgcagtgccccaaacccggttgggtcagtcagctgtaattcccgtgttctcattctgcagcccatcctgctggaggagtgtactggtaacacccccatctcccttaagtagtagcaagtctgtcctttgtgttgatccccacagctttaccttctgagctgtgtgttctgcagatcctggttctgaagtggggagaccagaaatctgggggccgaagttttagacagcttatgggcctccagccgtcagtctccccacctagaatgtggccaggagacttccgggtgagggacaagaacatgactttgaagggtccattgaaggctagtgctgagaggctatatgcaaatgcaggcaaatgaagatgcaaagaccacatcctgtgctaagggggtgggggagcagaggcctgggttagggccctggggaggcccagagtccccattgcccagcgcacataggtaattaggctcctgagcggtaattagaaacctttctgggccaggaatggcagcctcaagccgcagcggtgcctggggagtaggctccccattagcctgctctaaccccagcccccacctctcccaaaccactagacgggatttccggtcccactgaaccattgggggcaggggaaaaaaagccagtgtgttgctataatttggtatttatccattaaatccgcccttctccttaggtcagggtgctgacgggagccccgggatgggggtagggcagcgtgccctggagccagagcaggcattcttctgttccttcgtaaccgccccgggaggtgtaggcatctccaagaccctggcgcccaattctgctgctgctcaccctgagacacctgtgcagtgggggtgctgagggaccaccagcgcaggctgcgggggtcagtggaagccctcgggcacccttccttgcctgatgtgtggtggggaatgtcacagtgcctcagcctggtgtcctctgcagaaccagaggtggagctgattttattgctgccaaacttgcccaactgctggtgggtgccccgccctcctcaggtgcactgccctttggaggggcgggcccaaatctgaaacttaattctgcctgtatctgtactatgacctgtaggccctgctcggaggttccctgggcccccatcctgaaccttcttcagtcttcattaactcgctctgtaccacagtttgcagtcttaatcctggtttacttcaaggcgcccctctctcagtcactttcccctaaaatccttctagctcctgctcccctcacccatcttcctggaagccttcccgggtggcccctgtctcacaatctattgaggcactgaacataccaggccatggctgaccatccagtaaccaggaggacaggagccgggtctgcattttgtggtggttcccagcatccagccctggcttgtgcacagaggagaggtgtgtgagtggtgaccttgggtccccaaaggcaggacctcttgagtcctttccttctccacccggatatcctggcctaccaagcatggctctgggcacacaggaaggcttctaaaacactggctcaaagaatgagaaggcaaggtggaccttgctgttgcctgttttgcctccagtggctgtccccatcccccagagcatccagctaggtcctgtggcagcaccagaatctccgggggccagggccctgagttcccccaggtcttttgtgcacttcccttttcagtgggtatttttagctgggcgtaaacagttactgaaggctcccacgccccattaggcagcagagttttggcaagggggaagggcaagggagccccttgacctcccctggccctcagcacgtgcctggccttgggggtctacagctgcttccagggtaggaaaagggcagcctgggagtttctgggctcccagttctttctccccactccttgtcagcctgggctcacaagaaaggctgcctgaggctgcagccactgacctcagcgcttgggcacaatgccagcctgttcccgggaccccagcacaagggctgctgggagccgggtttagggcaggaagtcagagtgaagcactggtcctgccacatcccaagccccttgtcccctagccctgcgggaatggggtgacagctgctgtccctttggggttaactatagtcctattggttatgagacctcggtgtggtacagccagcctggcgtcccctttttttcattcgttcattcattcattcattcagcactcatttactgagcagccgctttgggcccagcccatgcagacgtgagtcagaccctcactttccccctgcagagctcccagtccaccctaaaccacaggccacaaccagtgaggttctcactggagcacggggatgtgtgagaggccttggaggcctcggcagccaacacagctggggacccaaggaattctccagagagaggtgatttacaaaaagtttcttatttccagttttaagggggaaggtaatagatgcatgtggctttaaaaaaataataataatttttttaaaagcccaaaaggacaaaatagcaaatgaacagtaaaaagtaagtttctcttgaacttgatctcactttcccttctcatcctagaggcaacctctgttaccagtttcctctgtctttccaaagataatcgaggcatatttgagtttagggaggtgttgcattaatacctctttaaaaacacaacttgtagtattccatagagaacctgcacctggctttttttttcacagccttttattttgagtatttgaaacctaccaaaaagttgaagtaatagtataatgaatattcatatatccttcatgcagatttgccagttcttaacattttgccacatttactctatctcttcttttatctacatagacatatgtgtgtatgtattttttgctgatttgagtgttagttgtaggcattgcatctttcaccctaagaactttagcgtgtatctcttatataatcacaatgtcatgatcacacttaagaaaattgacattaattccatattatctactatgtccatttcccctctccccaagtgatttttatagctgtccccccgaccaccccttgatatagaattcaattcaagatcatttattgaatcttgtcatgtttctctagtgtcctgttcaatctagaacattctccagccctttttttgttttgctcttttatgacattgacatgaagagtccgggccagttgttctggatttgtctgattgcttctccctggttggagtcaggtggaacagctctggcaggaacgcccccccgggcaatgcagagtcctcctccaggaggcacttagtgtccatgcgtcaccttgctggtgatgcttcactggatcacttggttccggggttgtccgcacgtctccctgtagtgcaggtgctccttcctgtttccaattagcctgtgggatgggacttggaagctgtgtctgttctgctcccctggcaactttttcttcaatgacttgagctggtgttttgccattttccatactctatcatggggagtgttcagtatcggcatctagagatctcccctggccccatcacagctagagctatgctgtcccctttcagggacatcttgtaatttatccacccagcccccaactgatggacataaaggctgtctccccatcatctcctgctactacagacagcactgcagggactgtcctgctgtgtttttttaaggcatgggtactccagaagcagttgctcagctgcacccccaaggttgagtggaagtccctcggtaaaggaggaggagagagtgtgaagggaatggcaaggcggggagggagacagggcacaggtgtcctggcaacagcagatgggaaacaggtctggctaaggtaccagaagccaacaagtcccagaaaggtcaagtgactttcccaaggtcacacagcaagttgatggcagagctgggtacaggactcagagcatctgacacccaggacgatgttcctgcactgttccatagagtagcccgactcttaagtttaaataaccccaggaaggaccccctctctgtgcctgacccccgctgggttgtagaggcctaagtttgcagtagctcctcccagccactctggctgtcagcctctgacctgcagtgggagggtctcaccttctggagatgttttaaggaggggaccccggcctaggcactagctgggaagccactgagccatcttgtctgcggccactgacgtcagtgcttgggcacaatgccagcctgttcccgggaccccagcacaagggctactgggagccgggtttggggcaggaagtcagcgtgaagcactggtcctgccacatcccaagccccttgtcccctagctctgtgggggtggggtgacagctgctatcgctttggggttaactatagtccctttggggttaactatagtcccattggttatgggacctcagtgtgatgtagccaggctggattcccccttttgtttgttcatttattcattcattcaggggtctcatgaccccaccagggaggagccgtccaagagagttagcagctcccacttgcaagatgtctgtggcaaggcaggcactgttctggtgctgagagctcaactccagtcctcacagcagcccccagagccaaggagtatcaccagtccattgcacagatggggaagctgggttctagagtcacagccagcagagtaaaggtgatgagtttagccctcttccctgtttccagaccctctgaggccttcagagcccagctccttgaggcagcccaccccgaccgctcctaggcttacccttccctgagcaccgcccctgtgcccctcatagctgcttctgcctcctccctcctccctcctctcccttgcccctaggctagtgtggtccccatggcaactcctggggcctgtccggcagggaggcacggggctatggggagggctggctcagcagctcaggagtttgacacctgagggggacagaatgctcactcaaggtgtggccctagggacccccgccttgcccctgtgggcctcacttggggttctcatctgcaaaatggggataataatagcttctctgtctcagagttgttagaggatgtgatgagccataacgtgccaaggacagggcctggcacagaataagtgctcagaaaacagggcctgttattatttttattattataatcaaggcagtggggaggcggcggtggcagtagctgtaggccaggaagggagtgtttgcaaactgacagctggaagggtgactaacagcgcagcagcctccgcgcccccctgtggtggcagggagtttggggaggaagggggaggcatggggatgtggaatgctagcagggcccctattcagaaggacctaaaggttgggggcccagccagccctagtgggaccctaattcaagctctgtcacccctaactagctatgtgacttcaggcaaattgttcaaccagttgagcctcagtttccgcttctgtgaaatgggggtaagagggttagaagagctcacaatcctccttccctccccgccacccccacccccacagcttacagtccacaggaggcaggggcaaggggtcctcaccacccccaccctcacagcttacagtccacaggaggcaggggcaaggggtccccgccacccccaccctcacagcttacagtccacaggaggcaggggcaaggggtccccgccacccccacccccacagcttacagtccacaggaggcaggggtaaggggtccccgccacccccacccccacagcttacagtccacaggaggcaggggcaaggggtccccgccacccccaccctcacagcttacagtccacaggaggcaggggcaagggatggttcctgtacttagtggtgactgagtcatgtggatggaggcaggtttcaggctcatcctccttgggcctcagtgtccctgcctaaacagcaggattgatggcctggcctctggggatagaaagggccctgtattctgggaggaacggaagctctttcatccaggggatggggcaggggcgcaccagacatttccaagttcagggtttcattccagcccctcctcagccagcttgcaggagatacctgtcctccccttcagggtaagcaagacttagaagggttgagtcactcaccccaagtcgcacagtcaacagagccaggtattaagcccaggcctgactatagagccaggtgtgcggcctggaagtgttggttctccctggccgtctcctccccagctccttctgctctccatgatcacatgcccccctgctgaggccccatcgcccttggagtcaaaccctggttcctcacattggcagtggaagtccccctgctgcctggcagagtttatgccaggcccacttgaaaccatcccctacagtgtcccctgagcagcggtgctcaaggtggactctggaagtgtgtggggtcctagagccccagatgggcagggtctgccttcccgcttccctcaccatcggcttccacctgggccagtttctcatactatgccagtcccctgcctgacacctttgctcagactgctgcatcaacctggggtgccttccctggcccgccctctgcctgtgtaagccctgcaatcttcagggctcagccccagagctccctcctccagggagcctgtctgagctctgcagtccgtgcctacttcacacccccagcactttgcactaaaatgtcttctcccgcgccactgcactccagcctgggcaacagagcaagactccgtcgcaataataacaataataataaaataaaatgtctccttccactggggtaggtagcaatatttgtgactgtcagcctagcccccagacctcatccactgtatcaaagagcccagcaaagaggctcatggaggagtttctcttctaacacactgtgaccacgaagatgccactggccctttctcaccctcagtttcctcacccgtagaaaggaaacagtagttccagcccctctgcttcctgagacaggtccaagggggctctgggctgggattacaaagtatgtgtgtgcagacgggtgggttgctgctctcagggaatggggttggctagggtagcttttttggggagtcaactttattgaagtaaatatacggttgacccttgaacaacacaggggttgagggcatcaacctcctccctgcagtcaaaaaatcatatattaacttttgactcctcaaaaacttaactactaatagcctattgttgtcagaaagccttgtagataaagttgattgacactcattttgtttgttatatatattatatactgtattcttacaataaagtaagctagtgaaaataaaataagaaaatcatatggccgggtgcagtggctcacacctgtaatctcagcacattgggaggctggggcaggcggatcacttgaggccaggagttcaagaccagcatggccaatatggtgaaaccctgtatctactaaaaatacaaaaattggtctgctgtgttggcgcacgcctatgatcccagctactcaggtggtcaaggcatgagaatcacttgaacctgggaggcggaggtagttgcagtaagccgtgagtcaccccaccactgcgttccagcctgggcgacagagtcttgctgtctcaaaaaaaaaaagaaagaaaatcataaggaagaggaaatatatctactattctttaagtcgaaggggatcattatgaaggtcttcatccttcacattgagtaggctgaggaggaagaggaagagttggtcttgccgtcacagaggtggcagaggtggaggcggaggaggtggaaaggaaggcagaaaaggcaggcacactcagtgtaacttactgaaaaacatccagccacgtgtggtggcgcatgcctgtggtaatcgctacttaggaggctgaggcaggaggattggctgaacccaggggtttgaggctgctgtgagctatgatcacgtcactgcactcctgcctgggcaacagagtgagaccctttctcaaaaaaaaaaaaaaaagaaaagaaaaagaaaaaatccatgtgtaactggacctgcgcagttcagacccgagttgttcaagtgtgcactatacaccaaaaagtgtgccgatcgcaatggtacagctcagtgaattgtcacagagtggacccacttcatgattgggctcagacagtctgaaaaccaaccccagaggtccccttgcattccttccagtctccctgtcccaagagcagctatcctgacagcatggattagtttggccagattttgaactttattcaaatggaattacataatatgtactttcctgtgtctggcttcttggttaacattttatttatttatttatttattcattcatttagaggcagggtctcactctgtcgcccaggctggagtgcagtggtgtgaccttggctcactgtagccttgacctccccaggctcaagcgatcctcccacctcagcctcctgagtagctgggagtacaagcacgcagtaccacccccggctaatttttgtatctttagtagagaccgggtttcgccatgttgccgagactggtcttgaactcctcctgggtttaagccatctgtctgcctcagcttcccaaagtgctgagattacaggtgtgagccactgtgcctagccatcattatgttttgaaatttatcgggattggccaggcacggtgactggcacctgtaatcccagcattttgggaggccgaggtgggtggatcacctgaggtcaggagttcgagaccagcctggccaacatggtgaaaccccatctctactgaaaatacaaaaattagctggttgtggtggtgcatgcctgtaatcccagctactcaggaggtggaggttgcaatgagccgagattgtgctactgcactccagcctgggtgacagagccagactccatctcaaaaaaagaaaagaaaagaaattcatcagtgttatttaatggttggagtttgtgttggagtttatttaatggttggtgtttactgctgtacgtagtcccttttgtgaatatgccactgtttatccattttcctctggatcggcatctgggcagctcccagtttgaggtttattacaaagcatgccacttgtagccctcctgtgcctgtctaggcagacacatgtcctgtgtcctctcggtgtgtacctagaagtggggttggtatatgtttagagatgctacctgggcgggattttgcaggtgaaggacccaaggacccacagagcataagggactttctcagatcacatagccccttctcagagctgctccggggcccctttccccacagaacagtagctggaaccaggcctggggctgacggtcaggtgtccattgtcccactagccccctttgctcctttctatcagtcctggaaggccccctgtggccttagggttggtggctccctctgcccctgggggtcctcagccctcatgctcctctacccagtaccgtcagcctgccaggactggagagaatggcccatgtgtcaaatcccagcgcaggacactcttggcacctgttcatgcccagtgaggagccagatctcagcagttggggggcatttcttcacacccctcctcagtcttcatgctcttccccacagctctaatggtaccaagtgacaggttggctttactgtgactcggggacgccagagctcctgagaagatgtcagcaatacaggtaccacaggggtgagggtctgggacatgcaagcattcccaccagccccagcggggtgcttagcagaggagagaggatgcagcttagatcaacccactcccctttttcccagcactcagtcaggtacaggcctggggaagtgggggagtctcaacaggaagggacccagggctcgttctccgggcagagcacctcacccaggctcacagaggccagctcagaggctgtgaccacgagggtgcgccagcaggtggctggagggggcccaggctgcacccgcccacgtgtcacctgccttgcaggccgcctggccatccggtacagaatgtattgccaagtacaacttccacggcactgccgagcaggacctgcccttctgcaaaggagacgtgctcaccattgtggccgtcaccaaggtaatcaggtgacgcccaccccaccatcccactgctgggccttccctctgcagggggaggtgggcctgagagcatgtctgggctgccctctccccaggaccccaactggtacaaagccaaaaacaaggtgggccgtgagggcatcatcccagccaactacgtccagaagcgggagggcgtgaaggcgggtaccaaactcagcctcatgccgtgagtaccacgaggaggggttggggagggaaggggccttggtcctcctgaaggagcatcaggagcaagcagggaggccagagtgaggggcttgggtgttggggagggcctcaggaggaggtgcagggtgcgggtgcgggacctcacagagcagggctgggggcagaggcaggagggtggcaaagaagggacagggagcagaagaagagggcctcaaatgcctgactgagcgagtgcgagccacgggtgccaagcagagggaaccccttcagaaaggggagccagggtcagtacctttgggccaccatgacctccagccctgctgctccccagttggttccacggcaagatcacacgggagcaggctgagcggcttctgtacccgccggagacaggcctgttcctggtgcgggagagcaccaactaccccggagactacacgctgtgcgtgagctgcgacggcaaggtggagcactaccgcatcatgtaccatgccagcaagctcagcatcgacgaggaggtgtactttgagaacctcatgcagctggtggaggtgagctggggggtacagagccttgctcccaccctcacacaccctaaacccatctggggccctggcttctagctccagccccactgcttctgcgtggtgaccagccatgtggggcaacttctgtgagcccttgtttcctcacaccttggtggagcagctgctgcgtgccaggactcacctctgaccccacagtgccaccatgaggaggggagccttatcctcattttatagaccaggagttgaaggttcagagcagttaggggacccacctgaggtcccacagatataatttggtgccaggactagaatctgagtctgtctgatcccagagctaactttcctccagccactcacagacctgcatgctcagaagcgtgtgcagaaacatgagccatgcgccttgatcgccagggcccctgaggctctcgcacctgcacggacatgcccacaggtccctgcagcttcccaggccagctctgccagccctggccaggccacacctggcatccggtagccacaggaagcctcccgtgtccctctgtattcactcttatctccctcccctactggcctggcttggcctgtggcaggtgagggtggggtcctgggcactcctggctagaggctggtttcaggactgagccatgggttgccctctgcatcagatacccatggggcccagagtggtagcagcagctgagtgtccagcaaccgcatgtagggtggcatgggaaatgggccatacgtcataatctgggacttccctaacccctgccctaccagaaatggggagccctccccactcagtgactccaggctaggcggggctggcctctgccgccctctggtggtcaggcctggacggtgcatatggggcaccttgggctgtctctgagcaccctgccccccacaccctgcagcactacacctcagacgcagatggactctgtacgcgcctcattaaaccaaaggtcatggagggcacagtggcggcccaggatgagttctaccgcagtgagtgcaccccaccccagacctcttgcccacccacctcctcccacgcaggcttcctggcactgccccatccaggaacctccagagaaccccagtgcctgatagtccagtcagcctctgtcatcccagccatgtccctagtggcctccaggccctcactggcccctccccacaggcggctgggccctgaacatgaaggagctgaagctgctgcagaccatcgggaagggggagttcggaggtgagctgggccgggccccctgggggggttctgagggactccgaacttgggaacaagaccacctctctgcccccagacgtgatgctgggcgattaccgagggaacaaagtcgccgtcaagtgcattaagaacgacgccactgcccaggccttcctggctgaagcctcagtcatgacgtgagtgggggcggggtaggggggaggttggcctaggttaggagtgaggcaccagcttcccctttctgaccactctcgtcctgccccaggcaactgcggcatagcaacctggtgcagctcctgggcgtgatcgtggaggagaagggcgggctctacatcgtcactgagtacatggccaaggtgggcacctgccgagacccggcactcaggccttccaactgccccgaaacccccactgtgctctagggcccctgctccctcagtcccccgaccccaagtgagcttttaggtcaccagggctgggcttttgtcctggtttaccattcattgactgtaacattggacaaatcatgtcacctccaagcctcagcatcacatctgggaaatggagataataacaacttagagatttgtgagagtcaagggataaggcatgaataacacagagcagtgtccggcatggatgttctggcccctccccactccttccctgtctcacacctccctggagtgtcaacacccacccggccccagcgtgctgtgtgagagggctgcagggcacgtctgacctcggcctggtctgtccttcctgcccccaggggagccttgtggactacctgcggtctaggggtcggtcagtgctgggcggagactgtctcctcaagttctcgctgtgagtgaagcagcctcttggatgggtagggtttgaggggtaccctgccctgctatgggagccccagtctgaggggacatgtggctggcctacccccagagatgtctgcgaggccatggaatacctggagggcaacaatttcgtgcatcgagacctggctgcccgcaatgtgctggtgtctgaggacaacgtggccaaggtcagcgactttggtctcaccaaggaggcgtccagcacccaggacacgggcaagctgccagtcaagtggacagcccctgaggccctgagagagaaggtggggctggcctcccctggggcctacagaggtgggcaggagtcctgggtcactccccaccctggagtcccaggatctgacgctgcttcttccatccacatggcagaaattctccactaagtctgacgtgtggagtttcggaatccttctctgggaaatctactcctttgggcgagtgccttatccaagaattgtgagtatgggtactgggatcagggtggctcttggagcaccggaggggttggcaggggcgtgagcctccttgggccctgcctccccaatcaaggcctagaagcctcaggcctgccctggggagctcacaggccactctccgggcctgggtctgcggcaaagctgatgggcatccctgagaggctgctgggtaggtgtcctctctgaggccagggcctggactgactcctgcctccccctggccacagcccctgaaggacgtcgtccctcgggtggagaagggctacaagatggatgcccccgacggctgcccgcccgcagtctatgaagtcatgaagaactgctggcacctggacgccgccatgcggccctccttcctacagctccgagagcagcttgagcacatcaaaacccacgagctgcacctgtgacggctggcctccgcctgggtcatgggcctgtggggactgaacctggaagatcatggacctggtgcccctgctcactgggcccgagcctgaactgagccccagcgggctggcgggcctttttcctgcgtcccagcctgcacccctccggccccgtctctcttggacccacctgtggggcctggggagcccactgaggggccagggaggaaggaggccacggagcgggaggcagcgccccaccacgtcgggcttccctggcctcccgccactcgccttcttagagttttattcctttccttttttgagattttttttccgtgtgtttattttttattatttttcaagataaggagaaagaaagtacccagcaaatgggcattttacaagaagtacgaatcttatttttcctgtcctgcccgtgagggtgggggggaccgggcccctctctagggacccctcgccccagcctcattccccattctgtgtcccatgtcccgtgtctcctcggtcgccccgtgtttgcgcttgaccatgttgcactgtttgcatgcgcccgaggcagacgtctgtcaggggcttggatttcgtgtgccgctgccacccgcccacccgccttgtgagatggaattgtaataaaccacgccatgaggacaccgccgcccgcctcggcgcttcctccaccgag

SEQ ID NO: 48 - DNA, 144259 bp, Homo sapiens
attctccgcggcgcggcggcgagtgctggctgcggtaccctcccgctcgcttgtccgtctgcgcgcccgcgatgtgaccagccgactgggggcgggctggcggctctgcctgcggcagcgcatcggtttttctcctggcaggtccctaattgagccgtgattcccttggagccagagacacccaccaggggctcggagcgccgcgctccggggctggaggcagctgcagcgctcgggtccgcgcggccgggtgcagtagcctcagtcccagccgccgcctcgctgagtcgtgtgccctggcgaatgcccggcgcccggcacagctgagccaaggcgactggtgcagagcggcggcgcctggtcctgcacttgccgctgctgccgggctgtgccggggcggcggcgctgcgcgccggagtttgcagaggctgcctccgagcgccgtccgccaggaagactccctgcctcctgagtcccagtaagttgactgtagtttctgaagttggagggagccgtgggaaggagaggttcgtttttatcttcttgtgggaagccgagggtggcacctcttgttaacagagttccagctcgaggagggagtgcggggtgccaagaaggggacaaggcagctggaaggtctggagtccagggctggctgacctcagcatctcacgaatgtgccagttggaaatatgctgggagaggacaggtactcctagggcatttcgactgctgcgtgctaattattcattccaagctccttgactctgtgtttacgttggggtgaaggggctgggcagggtcttgtcacctccatcctaattcctctggggagtgtggccagcactgcgatggatctttgggcgagccatttctttcaggcctgcaggcttcccgcgcatcccgctttactcttcccctaggcagaagttgccaaccttttcataattggagcctagtcctttagggaaaaaacaacttatatgtcgacccggtgttttatgccctaaggcaaataaaacgagctctgggcgtgtgaattcatacactttaagaatgtaggcaagtctcaagaaataggattcagataatgacacttggatttcaccctgattgtcctgcacctcttatgtaagcctcccggctggataactttatctctgcagtggctgcagctgtggccctccattccatttgtttaaagtccaattgaacagtatttactgaaaatgctgacatgatatagcggcctgaagtctgaaacagagtgcactcttcaaattggagtgtcttctcctaatagggagcatgggaggaacaacccactatatttttcaaggcagctccaggaattagacccataaatcatgttttaaaatagcatgcattgtgcagagagcatgcagaggaccgctttttgaacacatcccctttgttttagaaaaagtggaaattgttcatgccagacaattgttgagtctaaaagttaagtgtactgatgggcctaattatcttaataaacaaagagcatgatttataggtagctgcagtgccctactttgaaggatagaaatctttaacctttctttctcagctgttcccgagagattccttttaagcagagctatggattatcatcattgatgtttaatacctgagttggttaaacttgtaaaaggaatagtactttgaagtaccatgcagtactgctgtgtgactgttacacagcgaatattataaataagaggaatatttggagtattgggtatagatgtcattagtttaacaaaataggtcatattaagactttcctgctaaatatatatacacatacataaatgtttaatttggacttgaaattattgtttaaaccaaagctcaggggtatgttttaatgtaagatttatttacataatctttgaagagagaagtgcatttatttatggtatttcagcatgcagaacaagatgaactagttataggcaccttatttaaagtgtaaagggtttttttttaggaatactaagaaaatacacaaaatgttatttcagaagttgaaaagttagtcacatcaacacattgcggtttgtgagagcatccagtgcttatctctagaagagattacatccaagcatggaatctcaaacagattgacccattaagccctattgcagcctggttaggaggacaggctatggagccaggctgccagctctggtaccatctgtttgaatctaggcaagtaacccaaagtctgtgcctcagtgtcttcatctgtacaatggggatgacagtagtagtacctaccccactgaacagtagtgagaattaaatgagttcatagacatagagctgttgggccagtatctggcatattaagcttgttctgggaaaaattttcattgttatgaaaggaaatgcatctttggactctatggacattgaattgctgctatggacattgaattgctgctgatgaatattaacagaagcagttcatgtgtataataggagagaaggtataaacatttattgtgcactgtctagcgatacagacaccaactggtatttaacactgtcttgctcaattccccaccacagtcctttgaggtaagtggcttcatctctactttagagatgagaaaatgggagctcagtgagatcaaatagtagaaattggagctggcatttaacccacgtctgtctgtgttgaaactgtgttctttttgaccctgctgcctcaacttgcaaatgaagtagttgcattattatcctcaatttatacatgaagaaatctaagcttaaggattaaagtatgcaaagtgcttaacagcacccacaacagaaatgatcataattattgttaaataacttgcccatgcttccatacctcctaatgtgtggtagaggtgccaggtctttcaatttgaagtggattctgttgctttattatttttctattcatgcattcagagagtcaaaaaagaaaaattggtgtgatgttagagtttacactggagggtggtggtctccatttggtttcctgcctgcacgtgtagctgcagcaatctacacagtcaaggaaaccaccacggcagcagtaatcaatccacaaacagcgtcatccctggatatgcattcagtcccagctggagaactcccttgggcagagagaggccttgcactttgcctcatattaaactgcatgttcagaaaaagaaataatttatacttaccattaaataagcatgcttccttcaagccttagtaccccatgtcatgggaagcagattccggggtgctgtgtgagcagtacttcctttaaggtttccatagcttgttagacttctcagctgggttccagaggtggggaatgattgagaggtcatggcatttttgtggctgtgttaggttatcacccaaatactagatagtgttctcgccttttgtaagtcttatttctagagattaaaatctaattgccgtatagggcacatagaccacagactgctcacagtctgatttaatttaaatcacagactgatttaatgtttaatgaaatctcttagctaatgtatgctaacactgaatggtgcttcaatataaatgctcaaagttggctttaaaaaaaaaatcaaaactcttcgagagttctactcttcctgtaggctgcctccatgtgcctggggacacaataccatagttgcaaagtgcccaaaagagcccctgccattgactgagtcatctcacatctctgaattatcttctgtttcaacttgaaccctccttttcagagaacagatattcccttttgcttacttaatagttaatttcaagtgttcccctgctctgggttggttattctatagtaaaagtctcccctgatcacttttgtgacttgaatgaggttcatgatttattattaactaactcctcagaatatacatatagttgtttcatttctcatctatgttatctgttatctatttagtggcttatctgtgtcacttttaaatctctgaataattttcttctgacatccatcaaaagatacatgtaaaagaaatgcaaactaattttaatatggatataaatgaatgaagaccattgacagtcatatgtactgttttgaattttcttcactttgggcttgaggagttgggagctgatagttccagagctcctgcctcatgcattgtgagaggcacattgggaggttatacaagttatacacgcaagcagttcatgtgcagccccgcagagacagcccctgagggctcgctcattgctgagttcaagggcaggggttaagtatgaggggaaaacagctctgtacataatttatatgaccacatttctagtccttactggttatctttctggataagaattggaatgaatagcttaaagggagcacttactgtgtgttggctgccatgttaagaactgcccttcatcctcactgtgaccttgtgtggtagtactttattatcctcttttgtggaagtgacaactgaggcctagaaaagtcagggcacttgtccacggtgacactagtgagcttcagagtaaagagtggagcccagaactgtgcaaggaggcccgtgatacttatagaacgttctgctgccactgatttttgagcctttgtgatagctaaactctattgcatggatttatatattacataatatagatggactatattatgcttttcagaagaatcctatactatcttgcttggtccccaggtgaaggaatggtgggaagacacatgcctaccttcttagccactgccaggagcaggaattgacagcacaggaaatatcatctccattatctttgtagaagaagagcttaagcttagttcacgcaatgagctcaaaaaagaaaaccacatgtctgctttgtgaaataggaagcataaagccttcaactggtagtagagcacagtggggaggcatgttaactttatctgtgtttagtgtcacatacttgcatcattctcactaaaaaaaaaggagaagtgtggagacctgacattttcttgggtgatttaaaagaaaaataagtttatttaaatctaaagaagtatcagcagtgaactgtcatgggagaaccacattactacagcagtgtcatctgtcatcccatgagactatggttttcaaaggaaacgaacacttatgtctaaccagtaaggcttaaacgtgttatcttatagtaagaacattgcatcaaatcgtccatgtctgtatcatagcctttctaactccagtcaaaatggagggtaaaaggacaattttaaaaccatctcgtaatattttcaaaacccttcccctgagccctgccccctctattttttctcgatttcatactggtgccaatatttgttcaataagttaattcatatcatcccctggagtttgaattataaaggaattattgtgattataatattttggcatatcctgttgatctctcatttgcccccatccttgatgttataggactgtatgatttttttaacctgagaagtgattaaaaacgttttaaaaatttagtctcctaaatgtagactgtttattgcagaagacagggaaattggcctgactgggggcatttgctaaaaatgcagagctcctgaaatcctgtgaaccttatggagtaagcaagtaaaaaaaaaaatacggaagaagaagtagttttaaaattgctcactaggcctggtgcggtgactcacgcctgtaatctgagcactttgggaggctgaggagggtggatcacttgaggtcaggggttcgagaccagcctggccaacatggtgaaacccagtttctactaaaaatacaaaaattagctgggcatggtggtgtgcacctgtaatccaagctactcggaaggctgaggcaggagaatcacctgaacccgggaggcaaaggttgaagtgagccaggaagatcacaccactgcaccccggcctgggcaacagagtaagactttgtctcagaataaataaataaaaataaaattggtcactaacagctttgtacttccctctcccatttcacagatgtccagctgacccaatccctaggtaccgtatcatgtattcatttgcaagtaatcaggttctcttgattttctaaaagtaccaaaaggtgtgactaaatcagcattactgtcatctgccatctccgtgttgagagagccccagggttgcatatgtaagcttttatgtgaatttattctctgaggaatgaagggtgatcagataagttctcaggcatctcgtctcactgtatttgtgactccatcattactattaaagttgcttccccctacgccatcctttcaccccaaaccatacccattccttcatcatgcccattgtggtggaacatgatgaaactattgggaaacttaagtgttgagggagctcatgttctaagtcaaaggaaaaaacacataacacaatactttttttcttttcattaaaaaaaagccagtccctaacatagctatacacaagaacaccacaccttctgcattcagcagttgggaattgcaaccagagtggccttattaattttttcctggcaccttctaaggagggctgtgagcctctaattcacatgtaatcaatcactagcagcttgtctgtgttttcagtcaaatttagtgactgaagggtcactaaatatcacaagggtggtatttattcatttatacattcaccagatatatattaatatgataccaggcacattgttagatgataagacctcaaataccagaaaatccctctctctgccctcaagaatctcagattcatgagggaaggagacactgagcagcagttggaaccagtgcttaaaggatgcttggctccgtcaggggtgcctgactccaaggggatgacttttcctaacgcagccgggcttgatggagtctggaagagccagtaggagggtaccaggaggctaagggtgggagtgggcagggagaaattattctgagagagggaacagggaatatggtgaaacaaaggtaccggagaggcgggttgtggaacagctggtcattccatgtggctggtgcacattgagggtggggagtgagactggagatggagagcggaggctggagccacttttggagggtcttgtgggccatatttagttttgtagatgaatttgagtacttttttagaatgatcactctgggtatattacacagaatggatggggtaagggacagacaaagtaagctgtgcaaaaaaagcttttgaatactggtgtggatttaaagtctaaactcccactgataagcgtggggacattaaggggagaagcaaggagaggatggtgaatttaaggatgactcccaggtgtctggcttgggaattgaatccataaggctgccattggagatgataatgaatacagaggatggagcagtttgcaggagaagatgacaggttgtggatttatgcactgtgaggcaccagagggacattcaggacctgagatgcaattggcagttgtacagcctgtggttctggaattcaaaacggaggccgaactggaaatgcaggtttgcaagtcttccgtgtatttgaaattgttgttgaggttgtgatctgcctgtgagaacgtgtggactgaaaaaaaaaaaaaaaaggacgaaggccaaggtggctgtcagaagaaaaagagatggcatagtaagattaagcaagagaagtttttgacaagtgcttggacacaaagtggcagaagccagaggcaaagcagaatgagatgcttgattgaatgggaactgagtgacaaaagaaatgaaattgaaataaaaagagagcaaagggacaggtctgactgttaacttgcttccatctacacagataatggtggcttttactcctagagtttccggttctggtcaataaatattaagacctaccatgtggaaggtgggtgggaaaggggatggggggaagaaataaaataacaaggcatgaatttcgatctcaagaagcgcatggaattttcatttcttatttttttctggatctcaagaagcttatagaattatcatttcttatttttcttttccatttgtttttctccttcattgacagcaggacacaggcttcatgggagaatggaaagaatgaaagaatcattttgttggtgcatgaagtgcctcagttccccatagcgggcatatctcattttatccacaaaataaacacactgaaagagaaggtgataaatgatccattatttgacggattgtaaaaactaagcttttatcatggccataatgttattagagggtttggacctttgagccaatgcttatgtaattattaatgagactttcggctcactggattatttgatgtatgctgagtaaaatatcctataattttcacttgtcttataaaaacaggacacattatattatagactaactggagtatttggagatgatggaaataattaccgtatgttttagttaaatattatgcctttcagtcctcaaacgtttgtcctttaattttgacctaaaggtagaatcactcccgttatacatatgaggaaactgagatacagggttcagatgggtgggtggagataacacagctagtaagtggtagagcttctaggatccaaaatgaggtgtcctgggttcgtaccactccatcatgttgctgtatctttgtgaatagctactaaagaagaattagggggtgttatgtttaagagattttctttattagtctgctcaaagcaccaacagtagaagctgtatcagctacaatttctatatttgatgggccacaggttatttatgcaaatatatgtgattaagttagattgggggaaaatctgcttttttttttttttttcccacaaaatgaacatgttttgcattcattatctcaagagcactaaaaaagaatctgagtataaatataaggattcaatattttaacttataaaattattgtagataaacttatttgtgatacagtgggaatttatttttcagcaattgcaatggctgttgtctgtaagaggcattccgtgtgtacacgtacctgtgtgtgcatgtataaaaaataaaatttagcctaattaattttaaactattggttttccttttgtaatatttttgaattctccagatacattaaatgatattgcttgctttgtcttgccaaagcagctattatgttactcatttaatgccaaagtgttaaagcatttgtcttcggtaagcaatgtaaaatgatgtaggatgagcctaagggatttagtttaatgttacaacttgtattttggctcctgatagtctaaattttttatttacctaattttgctactattgaagcagatattagctgttaatatacagtaatattagaatcatgaaaagtacatagaatgttgtggctggtggaaaaactttatgatgctgcatttttttctttcacaaaaaatatctaggaggcttactaaattgcaatttccagatgaaagcaatttctagcaagtagcaaaatgctggtgctaatgcttatccctaaatctcaatttcaagcttcatggtgcctattttacattttagctttggtaggaaaagttgaatccaaaggggcttatgcctttgtgacatttggtggattgctcttttgttattggtgctgatttttaaaaataacaatacatttataaattttaaaaagttttaaaaaacgttaggcagctatcttagttctgaattatcactacacatggtgcattgtagtagccttagtccaatgtagttgaaaaattacaatataggcatgtgaaaatttaaataacaatacaaagtaatatggtattttatatttgatttttattgcactttataataatatgtgaggaaactcaaatgaggtaaaatgaagattaatttggtcatttcatgcctcatgtatcccaatttcatccaaatgcaaatatgataatccagggcatagagttagtgttctgttcaggtgatttgacactactgtatttattaatcacttccaagatgaacaattaaactgcatttcgtactcatctttctatgagtatatattttaatattatgtactaggagttttcattttctaaaaagtaattaaattttctttgtcttatttttcttattcttattgaattttattcagacatttttatgttagtgtatacttgacatgatagaacatgtctaaattagtaatctaatttgaataccataattatgtgtacagttagagcttgattgaatggagagcttttgcacatcctgtatgttctttctgttagtggatttaggaattacatgcttaatactaaagagtccaaagcctgtttatgtttatcagtaggcgcacagagcaaaatataaatatttttgccaatagaattggaaaagatatgcttccttttttaagtgttaggaattaacacgtaactgtctgtggtagttttctcttatacgaacagattgataagaaatatagacatggctgaaaactagaatggtgtcattgtattgcctaaattgttggtgttgaggttagaagtccactcctttgttttgctaaataagaaataaagatgctttaaaatattgatcataagtcctgataaatatttgtacatatttagtgttacgaatatttttcttttgctttattatgtagtggtcactttgcccaaaatgtacatcttgacctttagtatggaatgctcagtatgtccgaggtagaattgaaaccaaaacatctggagtcttattaaaaggatacaatatggataacagctttttagtcttggggctgagatatttggaagaggattgctaaatactgtggtcattgagaaaaataacactgatgtactaaacttacacttaatttaatggtttcgctaccaccattcttaacctttccaactggctgagttatttgctaatagtggcatgtcacatcctgaattatagatctttccttttaataaatattcaatagcattttcaaaatcgttctcctagatacaattcataatgaacagcgcagcgctggcaacaagcatgcttctttcagcctgttttatagccacaggctatttggcatttggacacttctcttatgtatttccacagctccacatttcctaaaaactgtcagccttatattagaattagcttttgcttctccacagttacatggagaatgaaaagaatatctctccttttctctccctgtaatatgccaaggactgtggtcagagaatcatcatttgctagtcgtatgctttttctttcttgatgttctcattagcttcagaagccatagcatgaaaggcattttgaaatgcgtccgccatcggtttggtttgatccatgttaaactttttctgtctagaactgtggttcttaaccccctagaggacatttggcaatgtctgaagacatttttggttggcacagctggggatggggatgctactggcatctggtgggtagaggccagggatgctgctatacattccacaatgcacaaaatagccctccccagggaagaattttctacctcaaaatgtctagagtgctaagcttgagaaaccctgatttagaaggtaggggatgtctgtttaatttgtattatattttttacgcaaacgaaaagtgatagttctggtgaagaaatcattgcatataatgtaatcatttattgaacacctactaggctctgagaatacaatgaagactatgacatggttcttgcctcaggggtataccctgtctttgccaaaatgattagtaaataaaatcaaactggttgatgtgatgtatgctgtgattagaggtatgcatggcatgttaagataaaaataatttagatttcatttgctaaatataagagaatatctggaagggattgttctctgactaaatgtaatatcagtcatttgtgggtaaagaatttctaatttttccttgacaattaggagtaagttttatttattgtctttttaaatttcaactggcattactgtgaaatgtcaggaaagaagggaaggtgttgacataaaaagtgttacttcaggaatttaggaaatgagtttttcatcatcttcatcgagttctagtttacatgccataaaagtctccaatttcaactgaacaattcactgatttttagtaaacgtacagagctagggaactgtcaccacaattcagctttaggacttttctatcaccccaaaaagctcccttgtgcctgtgtgcagttctcattcctgctgccagccccaggaagccaccaatctttctattgcttgctttcttttctgtctcactttctgtccttatatatttgccttttagcaaatctctggacatttcatttgagatattaatatttaccaataaaaatgtagtttctatcttctttttcaagatcagcatcaccttattttttttatattgcctgtaccatacacatgctacagtgcaggttcagggactcttagttatcggaactctcagactaataaagtgaaacatgcagcaaagaagtaaagcacatgtgtaagagtggaatgtgtgcctgtttctcagctttgtccctgtttcaatggtggtcaccccctctactacttttgtaactctgtctacaaaaataatgttatagaaagcattgaaaagctgaagtcagataaatactctcaagatgtggggaaactacaaaaggattaaatctggagaacatgcctgtttgggagctgtattctggtcaaccatttcttagccaaaccctttggggccaaatgtctttcagaattcagcttttagaaaggtaatacagtgtattcattgtatattaatgtaatacccccatgggatccaggcaacacacagtaatttttgtagcaaagtagatgaatattcacatttagttagagaaaaactaaccacatgtcagttcaggtcagtttggggaacaaactcatttcgtagcaaaataacaaactctgttttcagaaatttttgcatttcaaaattgtgggtaaaggtttgtgagactgcctcagtgtatcccaggatattgcatttcaaactattgcatttcatcttctttctagctccccaccctccaatcctctctgccatatacacacttcatttaacttagccatggatatatttgtctttctttttcacgttaacttcccatcagacttgacaaaatgccaaattagctgttcacttttggtggatgaaggccaggtacagatgtgttatggccagctaggtttgtggtttgtggttcacctctctgctgaaggcctggattgtagccatgttcatctgcaccagccccggggcccaagaagaataacatggttttgttgggtcaaaaagatacccatggagaaaaatccaaaggtagcaatggcagctgccatcccaggtagccccagactcatgctcagaagccctcacacccatcatgaaatcctgggccatgagactagactgctatagaaagagtgtcaaaccagggaggagaatccactagagtaaattttctttaaggaaagatatttagagttcaagaaagataaagacatgaagaaaactatgtggggttctgtagtggacccacacagctcagaagtaggacgccagtccaaaccaagacattaaagacttgttgcaaattattgaattttgcataatcatcttatgtaatttgcctaatggtccttagcaagcccattagtcttttaaccataaatttcacgtctgttttaatttccagatttccattggtagtacttagaaaactataactgcaggccagtgggtcttaactggtttcctgtggcactcttgagttgctatagacccatcgtgaatgtaaatgaatattttgatggatgtgtacaatttgctttcttacaaataaaatgcatactcttatagcaatattacttaagcagaatatactatagataatgggacccatttacaagcaaggggatccaatttctgcaaattataggaaagagcagagtgtagtgttgcaccagcatcagataaaacatttataggaacattcaagaatgttgtcttctaaggactcaagagcatcatcaaggcagtactaagttttcaaagagcaacgtaatgcttaaggtctacccatgggagtgaggtggtaattctggatgcttttgtagacactcagaagcgtgtaccagggactacattactactgtttattacttctttttttttttttttaaagttcttaattgattcaactgtgccaccaaaatctctgtctgaaggtgaaccatcagtatgaaattgaatcattgccatttggttgtgaaattacgaacctcgcctttcctacccacagacttctttcataggtgtcttggtgtacccccacctcctcctccagcctctgccaataactttctcacaagtcttacagcctctttgcagatatcattttctcttttacctcccagctttcaagagctaaacttgtcctgccttggtactgcacctgcctcctcttaccaagtgtcttcctgagtttgcacacattccttcttgttagtacatttcctgttgttaagaagctgacaacctcaccttattgctgccgcaccccattccacatttaatgacatcctccacccctacccctccccagctctggtgatgctttttagagggtggttctccatgttggctgtgattaacatcacctggggaagtttcacgtttactataacttatttccagggcccacccccagtaattttggttaaagtgccctgggggtggggccccaaccttggtagtttttaaatgctttccctggggatgcagccagcactgagaaccactggtgcatagggtgtaatacctgtctgttgtaggtaatgagagcaattgtggaaggggtagcagggagttttgaaaaaggatgaaaagagattaaaaaacaaacaactcttcctcatccctctgtttgctttcagcttcagctgaagagaatgagttctgctaagtggcacctatgcccacctggctggtgtgacttcttccccttaggcctgtgttctcatcagtaaattcctgacagccttgtgcccccagcaggccagaaaccattccaggcaaggcctttacttatctcatcatgaggcagcctaccaggggcctgattttcctttcttaactgggcatcctactttgcaacctcgtatttccatttttcctttttgtaaggctctgtaaaccaaagccatgcaccctccccgctcatctgctgtcagctcacttgaaactcaccagcccaaaggacacacacagcagaaccaattaaagttctcaagtagagattgttcacttcacttttcacttgcaagaaagatggatggcagagtctttgctggaaaactattgtgtagaacataattttgctgaattaaagaggggaggccactaccaaaattgagctgtcatctttttgtagttttcttttattcttaatacatctatgggcctctaaaatccctttttatatattatcaagtccaggagttgggcagagattcatttgggtagccttttttataaagtgatctttgtgaagtctcttctcaagactttctgggggtcagaatgcatgttcattttccagagggccatacgcaaggaccattggctgttccccacggctctacagtttctaaaggagctgagaacacttacaacatgagtgccttacagtactctctggacctcattgctttattattaaggaattatttcttccaaatatagtagttttatttttattagtaagtaggaaaatttaagtgaggtgattttggtgttaataacaaggattcagagctgttttaaggaaatccaatgtgaaatttacgtgaatatccagttgtacaaaaaaattaagacaaaacgcttcacttaacaaacttcttcataagaattatttaaatgccagccttctttaatggagtccgtttacagaaattctgtttattcattcattttccctgagcacagatattgcacaaagcaaataccaccctgctgttgtcctgttgcatggtaagaaatgcagcttttgtatttatcagccttacacatatagtgtgagaaccttgccaaggctggcagtggtgcaggccaataattaattaagggggcatgcagcatacatttattgagtacctagtatgtagcaggcacagggataggtagtacatatagaagcaaacaggctatctacccttacttcctagtggaaagagacaatcacataaccaagggattatcagtagtagacatttggttttagcagagagtaaaatatatatacatcgttaggagtgactgggaggctagggagggtccccctgaggaagagacatttaagctgaaatgtgaccaaaacaaccagggtttgcatgaattgagaccaccctggacagagtatatgcaggcagttgaaggaggccagaagggcagagagttgaggttgggtgcctgtactcaggatcgggaagcagcatggccaggtttatatttaggaagataactctggtagcagcacaaagggtgaattggaatccaagacagcaatgctgggaactcaaaaccaggatacttggtgagaatagaacaggcagcatgctgacttgatgctgaaatgctgggctcctcttttgtcctctgtcctctgtccaaacccagattggacctcacagccccatgagtacactagacctaatgaacttgttaaaatgcttttttaaaatgccaacttgtgtacctggtcctcatctaatgacgtggattggcatcgaagacttcattaaaacttcaaatgacctgatgcagggagttcatggaccaatctttgagaaatattgtgtctaaagactgtactttcactttaatattccatttaattctcaaaacaaccctgtaagaaaaacgtatttttcctagcttccagattaagaaacatgcccagtgtgattaagcatctggctcaaggtcacacagctggtgcatgttatggctggcaaagcaatgtgcttcttttcatagagagtcctgcctgtgtgaaaatggtaagaacaaccctgcaaaattcagaacacctttgagggttgtttcatgagtgaacatggtcaatctctcagatacaggactcaatatatcccatcttgggatagaaccagagtgttcatttttgctagcttttctcttttctgaagaagtttaatttttttttccctcaaagctagaattttaagttctaggggaaaatatatatatattgcaaagaagagcttggatcttaatattggtgtttctgggcctctttttcccataaaagaagttgaaaggtttaaggggtagcataattttatcacccatagacctagaaacccaaccattaggcctcacagaaaattgtcatgctttcagttgccatgaatcatttatttcttaagtggctcttgaaccaagagttgcaaaaatgatgttgaagatgtggaggagggttgctgagtgaaaagcacactgataattagaaatcttgcttaaaagctggcttgaaaacacatttgcttcaataaattacctgcctgcccccatctgaatgtgtgaggaaggttctagcttaatttgctcatgtggatagggtattgaacatatttatctgaaagacttaatatcataataagtttagcctggcctgacttttaggacgatgtccctcctggggtataggtagagaggaagaagatgaaaaacaaaaaaagacaagaaaacattttcctatggtggccccctgctccaccacacgctctcagctggggagaaccgcagtgagccctaccgcagcatcctctagaatgtcagcccacaccccacagcagactgcagggtgttaactgcctgtctctggcatgaacccagtttgaatgagatgccaggaagtgatggaggggctatacctccccctgaagcctggccattacgtcctgcagaattgaccagggcaaggcaggccgtttggtttacagaccacaccatgattgtcacagtgtagattgctgctttgattattttggaatgttggatgaacactccttcctgaggttattttcatcagcaacgatcaaattcagttgctactgcgtgtggctgatcgtccagagagggtgatttcttgtcacaggtttccctagggggatattgtgctgcttggtcttggtggtcagtctcacatcatttatggtgtaaggtgggctcagggccacatctgggggtatggcatacaagacatgatcatgttgtaaaggcaacgtgtctacccccttgtctgtgcctacatttgtgtctaagtgaaagaggaacctcagagacaatcttgaaaggaagacagttaactgcaattttaagaatgatggatttgcatgagggagaggctttagctttgtgataaaatgcgaaagcatttatgtgttgattacatagactgttcgtaaagtctggaaacatctatgttctagaacatattatgtgaagtaaaatgaacataccattaattatacatgggtcttcattggtttctagactttcggaccaccctcagactttttaaaattaatcatgttagattatctccccaattctagctgcatcctggattcatgtctcacccactgaaggtagatgccttacctggggcagattcaggtaaggcatacagtcagttctgttctctgtgcagctggttgtgatggtgccaagaaggctgtatgctgtcagcataccatttgctctgttttgttgttgtttttagtatatgtcttcacttattaaacatttattaaggagcaagtatttttaagtgcagtaatatgtatcgtacattaaggcctcacaattgctactttgtaggaaagaaaatctagttgaagtggtggtgtgacttgcctatatcatgcagctaagaaggttttgagttgagatttaaagagagatctgatacaaggcgtgttttgtgctttctctgtcaattctcatataatttctcctgttaaagctcactaccacaagaaatcggcattagttttgagatcagttagggattaaaagtgatttattaaatcagacccatgtccttatgacataggtaaagtggtatataccatgaacttgagaaacaattttcattattttttctatatgaggtggagaaaagcatactgctcaatgaagaacttaattttaaaagttgtaatgctgtttcatttgttgaattagttccatgacgagggatacaattttggatcaagctaatgttgctgaatctgtagagggacatcaacatttgatggttagttgacatttagaaaccccttcattctgacatgtagattctatggatttgtcatatttaacagagatcaaattatattcagaataaatgtatttcttcactgcctcattataggaaatgatattgtcattttaatattcacaaatggattttattttttgagacagagtcttgctttgtcacctgcactggactgcagtggagtgaacacagctcactgcagccttgacctcccacgctcaagcaatcctcccgcctcagcgcctcaagtagcctggaactataggtgcacaccaccatgcccagctaatttttcttttttttcttttcctttttttttttttttttttttttgcagagatgtggttttgccatgttgctcaggctggtcttgaactcctgagatcaagccatccaccttccttagcctcccaaagtgttggggttacaggtgtgagccattgcacccagcctggatttacttttattcagacagatgcctaaactaatattatccaagttttgtttctttttttttttttttgagacaaggtcttgctgtgttgctgaggctggagtgcagtgatgcagtcatagcttactacagggttgaactcctaggctcaagcaattctcccgcctcacccttccaaaagattttaggtgtgagccactgcacctggacagggtgtttttttttcttcttcttcttcttcttctttcttcatcctgtgacttaggatgcattttttaaatcccattgataaaactggtccttggactgcttgttgaagctttcatggagtttagcatttaccaagtcctactgtgaattgtttatttatatatgtatgtaatcatgtaccacataccaacatttttgtcagtgatggatcacatataaaaccgtggtcccataagattataaaatcatattgttactgtatcttttctatgttgtagtataatggccttacagtattcagtacagtaacatgctgtacaggtttgtagcctaggagcaataggctaccccatatagcctaggtatgtagtacactataccatctaggtttgtgtaagtacattgtatgatgttcgcatgatgaaattgcccagtgatgcatttctcaggatgtatccccgtcattaagtgaaacatgattctctactagatcataggagaaaagaattgtgtttagtgcatcttttggagaatcccttaggtgcctgatacaaaatgaatttttgctatatgaaactctaattcggcatgtgcaaataaccagcttgtcagtgtgccccaatatgcttccctcttccacatcttacatcttcctgtagtctttgccttactgtctcccattcaatagaggaggccaataaaacaggaaatcactcttgatgcctcttccttcaaggtctgtatgctctatctattaaatattgaatctgcttttgatttcaaatccttcggccattctcttagtttagacccttatcatctggatgacatatgttcctgtattagctagtctccattctgccagacttggctaggactatattatcaatattttccaccctcctgccagggagaattttctaacatgccaatctgctcaggtcattctttaaaatccttcattgatttttctgaacattgtctccaggtaagagatctaactccttaatgtggcatagagtcttttgcgatcagacccctggtggtcagtcagcctcatttcttgcattctgctgtgtgatctgtgttctagttatataactcagagttcctcacgtgtggcccgaggctttcataaaccactccctagagttcgtcagctgacttccctcttcaggtgtcctattctctgagaagctgatcctgattggccaaccacctcaacctaatctggtttcaatgtccctcatttgcattcccatgtgctctattacatccctttcaaaatgcctttcacactgctgtaattgctggttagtggtctctctttctcccactggactatgagcttcttgaaggccgatgtcacatcttaatatttatttcctcagtgtctagcattggatctagtctgtaggaaccaatcacttatttgtggtgttgggcaagttacatatcctatctttttaattgtcctcatctaagtaacagaatgtctcatagggttttgtgagaaataaaagagctaatatatagaaagcatcagaacagagtctggcacagaataagagctccatagatgtgttcttgttttatagtccaccccagggacatagaatactcactgaatatttgtagaatgctatcgattgataaagccaagagggagttccacaaattacctgggagagagagtagaaaaattgtgggacatgtcatggctgtattcctgtacaccaggaaaattaggtaattgtttgagattgttttaattatataaaaataccatttacattagcagcagaaactactcatggccctttgtgaagagaattatagaactattgaaatgcataaaagagctaagagtaagtggaaagatatatgcagagtttatggattgagagactcaatataggatcatctttgattttttaaattaatctataattttaatgcaatttcaatcaacatcttccttcacagatttgttttgttttttaaatgagcatgctgggagaccattctttatggactctcacgtttctgcatgtcatgcaagcagaggcactaacaacccttttgttctaaactgtcttttcaaggatgtttgtaatgtagctgtagaagataaagctgtagaagctaaagatagtgtttccctccagagcaaagggtaggtttgtttactgtacaatccaataaagataatgtctcccagcagggcaaggctccattatgaacagttcatgttccctaaactcagggttctttttttttttttcctttttgagacggagtctcgctctgtcgcccaggctggagtgcagtggtgcgatctcagctcactgcaagctccacctcctgggttcacgccattcttctgcctcagcctccctagtagctgggactacaggcacccaccaccacacctggctaattttttgtatttttagtagagacggggtttcactgtgttagccaggatggcctcgatctcctgacctcgtgatcctcccacctcagcccccaaagtgctgggattacaggcgtgagccactgcgcctggcccatcagggttctttaagtatgatacaaacccactgcatgcacagcgtctgcctgagtccctccacagtgccccctgtatttggacaccaagtagaagtgactgaacatgaaacttaatgctgttaactatcccataaataattaagtcctttgtctcagaccgaggagttttgtatcttcttccagcatctgtaaaaatgtgcaggccaacttgttaacttgtaagttgggtgaaatctcagatctttcacagttcttaaaagcattgtgataaatctccacttgtaaaaatcatttagcatattaaattacagcagtgaacaataagaatgtagtacaatgctttctcaaaaagctaaaaacaaatagatcagctattattgacaagaaagaaactgtcctttgctgatttgccttttttccttaaggatgataaatgaacctcttcaatttatctaaatcctttcactttgatattttccataacaactttcctttgctcttattagagtttagcatttctatatctttccactggcatgttaagctagcttcttttctgaaggtgggtggtggggttagtttgcttgtctgttcaaatatttgtttgctagtattaaataggcaaggcagatttatttgggctctttttttgtgacttagtactttcccactattttctagatctccttacccagctctctctgattacaccaaaagatattatagtcattttgctgtttgtctattttgtattatagtcattttgctatttgtattatagtcattttgctatttgtattatagtcattttgcaatttgtcctaaccccagccgtaaccctaaccccctaactataacaaggataaacacatcatggtgttaaatgcagtagagaaaaaaataagagaggtgaaaaaaatccgcagttaataatgattatggaatgcttattttagtgccaggaactattcttttgaagggtaatggactttgggggattaaagatcataaaaatagcattgataaccagttgtaattctaatgaactactgctgaaacacagtgttccacttgtgtctagtacatttctttcataaacatgtaaattactcaggctgcttcaaatccttttaggaaggagttgggaggtaaataatacataattaaagaagcacacccagacccaaagctctcttgagataatagatattaaggagttatttttggggaaaaaaatgaggtaattagacagtacaaaagtattttaaaattagagtaaatgttggttctgagaaatcttcagctttaaatcagtattttttccccccactgatctttgatatgtatttaggaggggcccaatgacatctcagatctcttccctttcctaaaactgtcaaaaatctttaaatcatagtggacaacatacaaaatggcttatttgggtctctggccccagcgcagggtgcctgaccagcccaggtgactgactgcagtgtagccttgcagccgagggtttgttctcctgcagccacagagccacatgcatgcgcttatccccgaaacattagctgggcttgttctgtaactttgtgcaagtcaagtcctactcagtgtgccctgtaacttgtttcttttactcagttattattgagattacagtatgttgcatctagctgtggttcattttcattgctgaatacagttctgttgtatgaatattcctcaattgacttatccactctcctgttgatagacatttgggttttatcattctgttctgttattaacacaatgcaaagaatatgcaagaatttctttaaaatgggtcagcaaactttttctgtaaatggcgaggtactaaatattttaggcgttacaagggcacatgtagtcactgttgctgctgatgcttctaaaattctttttttttttttttttttgagacagagtctcatctgttgcccaggctaaagtgcaatggtgtgatctcggctcactgcaacctccacctcctgggttcaagcgattctcctgcctcagcctccagaatagctgggattacaggcacatgccaccaagcccagctaatttttgtatttttagtagacacggggtttcaccatgttggtcaggctggtctccatctcctgacctcgggatccgcccgccttggcctcccaaagtgctgggattaccggcatgagccaccacgcctggccgcttctacagctctttaaaaatgtaaaagtaattcttagcttgtgggccatggagtaggggtcagcaaactgacccctgctctcagatatataccttagaatagaagtacttatcatcagtcatggacatgtacattttaaaaggcaatgagaaacttttttcaatgtggttatatcagtttactttctcacaagcagtacatgagagtaccccaatgcacctcctccacaccataacctgacgttatactttttaatttgcttgtctagtagatatgaaataatatcttattatgggcctcaatttgcatttccctggctgccaatgaggtggaacatcttttcctacaattatgaacaatttgtactttttctcatgagagatatttgtttgtatcttttgcctgttttttgtttgggctgtttatgtttttcttatcaatacgtaggcatttttatatattccagagactattccacttctatatgtttcaaatattttttcttttatgtcctgttattgcatccttttatgcacacacacacacacgcgcgcgcacacacacacacatttcttgccttcttccctaacagtgagagtaagaactactcatgtttgccctgaactgctttaatgtattcctgtctgaggatgaaaaaatgaactagatagatgacttctttttacagtactctcagtaataaattgatttagagtaaatattcattattaaataaggcaaaattctattatgaaatagcctgtaaaaacaagccagattggccgggcgcggtggctcacgcctgtaatcccagcactttgggaggccgaggcgggcggatcacgaggtcaggagatcgagaccatcctggctaacatggtgaaaccccgtctctactaaaaatacaaaaaattagccgggcgtggtagcgggcgcctgtagtcccagctactcgggaggctgaggcaggagaatggcgtgaacccgggaggcggagcttgcagtgagccgagatcgcgccactgcactccagcctgggcgacagagcgagactccgtctcaaaaaaaaaaaaaaaaaaaaaaaaaaacaagccagattaaaagcgtaactacttgctagaagaattagaattgtgtatgaaaaagatcctaaaccaaaaaaacataattgaccaaaatgcatgctataacattaagcattcaaagacttcaaatactgacagtgtacttaggtttacctgactgtattaacgattcagttttgcatatgaaagacttactctgaccaaacaaaactcaaatttattcaacattatttttaggtctcaggcacctggagatggtagcctgtgctatacctcagctgtgtaaggatgtgtcatgtgtccttttcacataaagggaaaataagtcctcacaaaatcctatatattcctctattcctctctgttggtaaatttacttctgtggacataggtagggtaatgtactattttctttcctaagcacatttcacggtaggccagtgggctgttttggacttgcatgttgagtacaggatggactcttgttattctaggaatgggcttggttgatcacagaacacaatgcaccttttcatgattttaatgcctgagttatttaattttttgtgctacttgtcacttcactgtttagttttctttctagggtgctttttgctggattggctgtgagtcaagctggttgatgaagcttcattttgctaaatctccagaatggcttgttaatccttattttacatttcactgactactgtaccatgcagtttccttctgttcaacgaaggaagagaaaatggctatatgaagcaataatgtgatgaatttagagtctagccggaggaatcgccatttgcttctaattggcacatggagcataaaatcagagccctgatttttctaagaactattccaagtaaaggcccaacaaccatcttaactcagagctactcctagattgttttaaagtgcgttcatcaatttgaagagtatttgtatttatacatttcttgcccttcattgtatcttatttgactctgatactttctctcaaatttcttaacagtaacctttcatgttgaactgtaaaaaaagaaaacggacttcatcttaatgtatttcacatagatttccattacttttcactgtgtttttgccactctgtacattttgcttataataaagggttggttaaaggaaaatagatgtaatttttggcacttgtctgctctaatatcgtgactgacactcataatgtacatccagttctcttaaatcccataaaaagccattgggaagaaaatttttgagataatataaatataatcttacgtaagacctgtgtagccacttcttatagacagcttaggaaagaaagaagccttcaaataattaccaaagtaggaagaaaactaaaaacctctcgtattaagggtaataattgcaaaatgacacccacatagaaaaagtcccttcctttcattttcttgaaatatattgaaacaaaaagttaactaacatcatttgggtaccttttgagaactttaaaatatattattttaaaattgattttcttaagggttaaatacatggttttgaagtttttcttaaagtattttgaaagtatttaaattgattttatgtaaacttttgctactattggatgcagccttttcagcatagcaaatgcaatgtccttacttaatgaggtttctaatttttaacctcaaaatgaaatgaaaaatttgttctatttccaggaacatggagtagacatacttttccctgttcttcccactaagtacaactaaaattcctagacattgttcataaaacaaacgtaagaagactctgaaaggtagaggaaagatggcagaatatctatagacctcaaaacccaagcaacacacaatagtgagttacctggcttttcttctttttgagtcgtatttcccagagctcacatattcccttttttttttttctaagatggagtctcgctctgttgcccatgctggagtgcagtggtgccatcttggctcactacaacctccacctcccaggttcaagtgattctcctgcctcggcctcccaagtagctgggattacaggcatgcaccaccacgcctggctaatttttatattttcagtagagatggggtttcaccatgttggccaggctgatcttgaactcctgacctcaagtgatctacccgcctcagcctcccaaagtgctgggatcataggtgtaagccaccacacctgactgagatcccatatattcctgatgaagaaggcagcaagtggaaaacaccaacaggcacatacaaaaacaaataagtaaaagatgaaaatctgttttctgaaaccagaggactagaaaaggtagagcctagcaaaatggaaaacttttagataataactgttgtactctagccaagccccacagaaaaaaaaatgtggcctcaccctaccagcaaaagctgatagggaagcctaaacttccacccttgccagctctaaattgagagctggggtgtcccaaggcaccccagccctcgccactgggtagtgtcacagaaaactgagtagggagccaaggcttttatttctgctgcgtagtaacaagagcctccacctcaaccccatgtaagtagaaaccatatgcggaacctgggtttctaccctccccaactcctaacagtaatgaggagcccttttcctctccaactggggtggtgttagtggacatcatgtgggaaccagaaacactgtttctcccagccaggaagtattgttggaggcccgatggagagccaaaactcccactcctaactagcagtaagaatgcatccccctcaggtatcaggggaggtgtagtagggaacctgattctaccccagtaatcaggatgaaccagcaataataacacagtctccccattcccttctgggagtggtaacagaggaaggcaactaaaatagaaagtttaagtaagatccaaagtctcataacataatacccaaaatgtccaggtttcaatgaaaaaaaaaatcacttgtgataccaaaaaccaggaagatctcacactgaatgaagaaaaaaaaaagcagtcaacagaggccagcaccaaaatgacagggatgttagaattgtctgctaaggattttaaaacagccatcataaaaatgcatcactgaggaattctaaacatgctggatgcaaatgaaaaaatagaaacctcaggaaataaataagaaatataatgaagaacctagggggcatcttagaacagaaaaatacagtaacccaaataaaaatctcagtggatgggctggacaacagaatgcaggggacaggggaaagaatcagtaaagagagaaccatcaaaattattttgtctcaacactagagagaaaatagaatagagagcctcaaggacctgtggaactacacttgacatttaccatttgtgtcattagagacccataagaagcataggaagagggaggggctggaaaagtacttgagcaatcatagctgaagacttgccacatttaacagaagactgaaacctacagatacaaggagttgagtgtagtaggccaaataatggctcccccgccaatgatgttcatgtcttgattcccagaactagggaatcaggttccttttttctttttattttttaatgtagtaaaagggattttgcagaggtaattaatttcaggatttttttttcttttctttttttttttttttttttttgagacagagtctcactctgttgcccaggctggagcacagtggcacagtctcggctcactgcaacctctgcctgctaggttcaagtaattctcatgcctcagcctcccgagtagctgggactacaggtgtgtgccaccatgcctggctgatttttgtatttttagtagagatggggtttcgctgtgttggccaggctggtcttgaactcctgacctcaggtgttctgcctgcctcggcctcccaaagtgctgggattacaggcgtgagccaccatacccggccaaggattttgagatacagcaatatcactcctcagcatttaatcccagagaaataaagtcacattctcacaaaaacctgtgtattaatgcttatagcaaccttatttgtaatagtcaaaactggaaataacccaaatatcctttaatggatgagtggctgaacaaaccggtacatccatatcgtggaatactactccacaataaaacaaaggagctattgatatatgcagcagctagtgtgcatctccagagagccatgctgtgtgaataagcccaatcccaaatggctacatgtaacatgactccatttatataacattctttaaatgataaagtcgtacaaatagagatgagattcacgattgctaggagttaaggatgtggtagggacaggagggaagtgggtggggctacagaagggcaacatgagtaatacttggtgatggaaatgttctatatcttccttctatcagtgtgtttaccttagttgtaatgttgtaatatagtgttgcaagaagttaccagtgagggaaactgagcagtgggtacatgagatccctctttattataagtaactgcttgtgaatctataactatctaaaattttaaaatttaatttaaaaaataacttttaaaaatttcttgtagctacatcaatttgaaaacacaatgctatatcatatataaagaactttgcatgtccaagttcagaaagatgttagtacgaagttgcctcttctaaagtctgtttttttttttaatttgtttggagattgggaaggaaggcaagggattctgttttatcaatcatatatgttaaaaaatagataatatttgttaactcctaaacaccgtgtgaggtcagcattattgtaaagaagaacactgagacgcagggaggtggaatgatttgccctgatgagtagtgaggccacatttggactggacagtctggtcccaaagcctgcatcctttcttactgactatactctttggcctatctgcataggctattagtatccaagtatctttccgcagcaggacactcacctcagaagttttaagcacttttcctaggtcacagagtcatagctgtgagactgaaattcaagacttttcctatcaaaatcccatcctactcccacctgggagaagccatattccaaatggccctcagacctgatcctcaagcatattttgtttgctcacttagtgctgggcagtagattattctttttaaatttacattagcagtatatatttaaacattgtgagatatgtaaaaatccaggcttctagcttctcaggaaaaataagaaaatctgccaacactgggtgtacattctcaaattctctcaaaggagttagatataggatgtttagggactgcctcttacagcctctttagatgaggttgtttgcctcagtccttaccactacttacccagagaccacaaccaaccatcagctggtttttattgtgcaacactgttgtttttcttacagtagaggaaatgcctctacccacctagctaccaaatcatggcttttatgttttaccttttatcttaataatttgggtggttgtattcttcctgattataaactacttaaagttctatttctgaaaatctccattattagtggatttgcagttgttaaacttaagacccccatagaattgaaggtgctgaaatcactagtccatctacgaaggctagtcactaaaacgaaataggcatacatgaactagaatatatctccttcaatacttcttaaattagaaaattatgagtattgcgcagtcactgtgttcgtcattacaattgctttaacattcctttgtaaagactttctagtagttttgcggagattcaatgaggtgcttataaattgattttgtgccaggtgcagtggctcatgcctgtaatcccagcactttgggaggccttgatgggaggatcacttgagcccaggagtttgagacaagcctgggcaagatggcaaaactcaacctctacaaaaaattttaaaaattatccgggcatgggggtatgtgcctttagtcccagctactcaggaggctgaggtgggagaatcacttgaatctgggaggttgaggctatagtgagccatggtcgtgccactgtactccagcctgagcaacagagcgagaccctgtctcaaaaaaataaataaataaatgaaataaattgattttgcttcatggcatgcgatacgcataataataataataataagtatttcttctgtgtctggctttctactgaagtattttcagttctacaattcaaggcccctccacccctattggtctttctcttaaggggcccaactctgagtgtctctcctgagtctcatatgctcagtctgaaatagttgaccaagtaggaaatggaagtaaagaatttcacggaaggggaatttgccatgagggaagggttaataagttattcctgttgatcgcctttgtaatgcctagcacattctcgttacagagtagacatccagaagtgaaatgattatgtttgatgctgaactcctaagtaattcaatattgtctgaggataatagtcctgcaaattatattacagtcagaagtgtttttgtttttgtttttttccagtcgaggagtagatgactggaggctgccttgtttgcgtgagtggtgttgggatgaccttccaggctgggcatgtgattcctgaagaagtggctacttgtttggctcctatatcaatgcagaaattagtgtttgagctgataggaagtaagggggggaaatcaaggagtggaaaggctgcttgggatggaatctgtagactctttctgtctgacctctggttgctaatctatgttattgttactggaaggggaggcctgcaaaggttgagtcctggcaaggatatcaccagagcaggagatcagtgacttcttagcttataattccactgtaggtgaaactctagcatttgcaggcaagatggaagataaggaagtgggtgaaggggtgaaaaatgaaataaatattgaataaagcgcctgtactctggaaccagattgtgcgtttttagtttctgcctcactctgtcatactattgtgtaagcttgagcaaataagttatctctgaatgcttcagtttcctcatgtgtaaaatgggaataataatagtatttacctcatcgtgtaaacagccagtaagtagcagcatctctgcactggacaatttttcttttgtcaattgctctttttattcggtacctacagtgtcatctaaatagcctgtcccttagtgtatggagtcaggagactaagaagaaatttagggaaaataaggaaggataaaggaataataagcaaggatgaaggattgcctgcatttgagacccttgtcaatgtgtgttttctccaaagaaaatgtgtctcttttccaaagaaacatagatgtgtctctttggagaacttgtttccaaccttagatgatttttcagattcagtctgtgtgctaaactcaaatcttctcattttctaagtacatctgttcatgacttataatatgttaggaaggtattttgccctggtgaagaaggacttagttcttattcctacttaactaagggatagagaagaaaaaccttcaaattacaatgaaattgattgacctcaattctttttagatatttgtctacaaaatgtctttagtaataggttttaatacttttgcagttgattttactaaacagattaaaaatttaagcccacttaacctcaataaacaagtatatgaagtcacatacaactaagtacttcaaacccagaaactctggcactgaaggagataaagtagcagacaccttctgtgtattttcctacttctgtacctcaagacatttgctgtgtacatttataacaatggccatgtcggaaataatatttttgggtttatggatttttattgatctatttcatttacgtgggtttgatcccaaatgatgggatgatgttctcttatgaagaccatgccttgagggaaaggagagtgcttttaagtaagcctgttcccttctggctctctttgatagggtggtctctcccagggtttatttaggaaatgatggaacacaggtcagtctgtccttgtctctaaccaatctaaacattttgctttcagcaaaatttacatattattttcaaacctttactccacatcttgcattattgatttgattaatctctgctgtttttaaggcatatcttcttcaagacagcatttttcttttatatccaacaaattcctttcagatttctaaatgcgaaaaaaaaacttagttgtggacaaaagtacagccattctctttacacctgaagaaattaatgttttttcgataaaagtcaccatatgttaggagggtgacaattggtattcaaatgtgagtgaggaaaagaataaagactgaggcaaacaaatattaccattattgcagtgttccctgcaatctgtgggttgttatttatttacagttttgttcctgtaggcccacagaagagaaatgcaaggaggagtactcctgaagtagaagaggctgtagaaggttggaatagagagcaacaaatcccaggtcaggatgtggaagggcttacaaatcacttaggctgtctgggtcccaaactttctcagctgtaaaatgaagcagttgaacttaatggttctctagttggtgcctcttagactttaatgtacatcctgttaaatgtgcagattctgactcagtagatctggagtgaggcccagggtttgcctttctaacgagctcctggggggtgccaatgctgctggtctgcagatcacacactgtttagcaagctctgcacgatttctaagctcaagcttccattaactctacgattctatgaacgtgcagtcagctgacattttagaaaagacaggaaggtttcatgaaacatgcctaccatggtattaaccattctcattcttcataatcatcttcatcaaaaactctttaagtgcctaattatgcataacagcttcccatgctttacaaaagtatatttggtctttgccttatcagacttgacaacctaagacagagaaatatgtatagagacagtaataaatattgaggcagtaataaatattgagtaataaatgttcatccagatatagaacacattaaaattttttaaaaagtatgtacttagcatgggccctaggatatttattttcttacagcttgtcttcctttcaaaatctgagaaaccaaagaagttgccctataatttttacatgaaagtaagagatttctctttctgttttgcagataggggttggaaatgggaaggtcagtttctgaggctacttttaatgttgttgtttgctttgttttggcctcactgacttaaaaagaaatattttatcagccctgaatgcctaaccctaattaccatatgcaggtgccttggcttgactttgtgcttctcagcactgtgtgtgtacataggcttattaaattagcgtcagctcctcctacccaaggacctcaggcccatctagtcaccctcacatcatccttgggaagcaaaggaggcagagctagacattgttatctctgaatcatgggctgttaggtgataccaagaaggaaactggtatgtccaaagccttgtgataattcacatgggaagctttggatttgattctgtttcttctgtacacatttgcatttgctgaactgacctaaggacttgatctgccttggtgtgggaaaggatcagataagaagtcattgctggcattttctcttgaaagcagaacaggttctgttcccggaggccaggtcaccaaccaacagagattgtgttcaggtacctgtagtgataagccagtttgttataactgtatcacaggttagcagagtgatgtcaggatggctcatttcattgattattgtaacttagcaagagctacaagaattatcacagatctagaaaatggtcacatctaagcaagggtctctgtatcagatatttaccaacagtgagattagagacccttgtttacaccttctcaactcaagtaggcacatataatatttagtagtgactatgtgtatgctcagagatgcgggaaagcggagggagctgtgtgtgccacgctcttgggcttcagctgtgtgttatcttgtgtgtgtgcgtgaggagctgctgtggaatcaggtgcacttgggtttgaaacttggctccaccactcactggctgtgtcacttcacatttctaggcctcagtttccccatctgtaggatcagtgtaacaatagtatgaatccttgtgagcattaagtaagatgaggatatatggaatgtatagcatggtgtctgcaaatagtacttgattattagtaatcatagtaaaactcatacacgacagcatctgaaattacttgtctttaaagaagttagagattcttaattatttcacatgcaagtgtttgtacaggaggtagtgtctgggttcatgaaaatgtcacactcattttattatgaataaagcttttaaggaggcaaagcctccattaactagactcaacctcatctttcatgctaatgtcatacacaactgttttctcttttttataaaattataaagaggcaagtcagtctactcatactagaagatacaaaaccctgactattatatagcaggaagctaaacttctaaaaagccacaaatggcaatactatacattttgcattagggtcttggaatagatctatatggacacatggaattacacaggctgaattgaggacactaagtatctggttgccttctctctggcaaacgagagtggagataggtacctggttgcaggaagtaaggagatgctctttgcctacagacagtgagggaaggctaaccagcatttggaggggcagcgttctttgggaaattgaattttaagcctgctaaccatatcataagactgcaaggcctggcagaacaagagcatgaggcagctggatagaaacccaagaaaccaaaatgagcgacttaaagtggagctgtttgaaggggaaacagagccccagggaatttcctaacctcagaatgctattcactcacccttttttatagggtgtctgtggcttctggttgcctgcaaattgagccagcatggtgcagatgtgacagtggtttaaggctgtttttccccaaatttagtgtgaatcacctgggggtcttattagaatgcagagtctgattcagtagatctgaggtagggtctgagattctgccattttcagcaagtccccagatactgcagaaactgctggtctgggaccatactttaagtagcaagtgtctaatccactctctcctcaaccatttcatcctctgatcaccaccttctgtcttctatcccctgtgccttaactccaaccatttgtggcccaccagtactcaccatccagtgatcctgctaattttccttgtctgtcaccccctccagttctcctttcctagttatctagcttagattccatgatcttgtgttataattattcttttgcatccaccctcaggttctttgctgctccctcttccctcatgatcctcactggcaaaaccccaaccctgcgtaacacagctctctccccacgccacatcttcacctacactggtgagtgcggctgaaggaacacacatcactgtgctcacaggtcccactttcgtctcagtgggtccctgtgccgctattctgtccattgttctgcttttctggatcatcttcttgtgtcctgtcctcaaacctcaaatacctccctctccatcctcattctcagctaataatcttgctgcctttcctggatctgcccacatgtctgcacgtgtgcccacacctggccagtgctcccctcagtgggtgtggaagcaccaggcatgctgtagctctctgaggggtgcccaaggtgggcacatggaggggccagtggaaccagccccctctgacctgcctcccccccaccttcaggtctgtgctcagctaacattttctcagtgctgcctttcctgactccccaactcaaagcagcgcccactccccaggcagtccctacctccacagtgcctctgtggttttcttcagtgattgtcacagctatgctgctagatggtgggtttgttccccacctccactagaaagatacataggacagggaatttcatcttggtcaatatcgaaacccccacctagaatagtggctgacatatggacattctccttaaagaaagtatttggatagatactagcatgggagatgtgattgtgtttggacagaatcagaaaaagccaactaggaagaactgcatatccacacatgtatttaaaaagccactcccggtctttttgaatagacaaggctaaggaagatccctgttcagggatacttttggacctgaatatgctgaatttactagagattgttgagcccaccaggccctttggggatcaggaggggaaaggaccaacatcaaattccatctgagaatcctgtcgcttgtctcatttgatgctctcagggaggttggtagtgtgagtcaggatttaaccacccgacactgctctgcactccgtagcattgtcatactcacttgggacactagcagagctgtaaccagttctattttacaaatctgcaggctaaatatgcctaattcgctgtggtttgaggaaaagagatatatcatggctatgcctaggactccatgtgggccaatcctgatgaaaacaaccacaggacaagttggcagtggaaatgtcctaagatggcacagaatgaagttgattgccatgaaaatatgttgtgctggtcattctcaaggagtcaggcgttcagtctactgaaagtgaaggaaaggcatatctagcaatacttcttattttattttgaggagttctgcttttaataacattgtcagcatgcactaaatcattgtctctcaaggttttgagcagctgtgatgcagagggaaaagcacagggtgttttgtgcgtattggatgagataactgacctcatgcagggctgagaatacaacaggtgctttttacatgcacccactccctcatctatgccctttccaatggtccccatccacactactgtttttctgcatgatatgaaagttaagatataaatatgagagtatgtgagtatgtgtttgtgtttaagagatgccctcactctgtcgcccaggctggagtgtagtggcacaacatagatcactgcagcctcaaaatcctgggctcaagcaatcctctcacctcagcctcctaagtagctgggattataggtgtgagccactatgctcaaattattgtgttttaataagtcatcattcattttagaccagtgattttcaacatggggatgattttgctcctaaggggatatttgttgaagtctggagacatttttgtttattacaactcagggcaggaaatgctagcccctcaaaacaaagaattctccagccccaaatgtcagcaaggccagggttgaaagccctgttttagagcatgtattttacattggtgtttatagttatttcctcattggactctaaataaatgaaggagagaattgagaaggatgtgactggctgaggacacagtgggacaggaggttggaacaagttgggggacccacctatcaggtgccaggattcactgactctttacaagcacactacagtttccagcttaaaaacaagtgctttattagatatactcactagcagaaccccaaccctgcataacccagctctctccccacgccacatcttcacctacgctggtgagtgtagctgaaggagcacacatctcagtgggcccctgtgccgctggtctgttctctcttctatactggttaagcctctaaagcagatagggtggcagaagcacggaggactcaggagggcagtgagcatgatgagatgacactggacaggctgggcactgtgatggggaaattgtcacaatgccaggggcttgggttttgtcacaagggctgtggagaacaagcacggatggggccctccagagccaaactatcctgttcttttctgtactgtattcacaacctgttcatactcctcttatcccttgcgtctctctgtattgtgctacttacttgtaacttgggctcctgaactgggccttgtcatctttgcctttgtgtgccccttgtatatagcacagagatttatcagtaagtgtttattaaacagatttggtggtgttttagacaccactagcagcctctcaaaataattgtttctccacttttgaacaagtactattcccaaatacttgttcccaatgcaattgtttagagcttgaaatgcatcctcctggttttataaatgataggttttcagactggtggggaaatttcccagcacccacagtgttgttgagccataatgcttagtagcccaggatgtgggatttcccagcaaaaggccaagagaagagagtttccattgcctttcttcgttgtgtgtggactcttggcaagtgggttctttaccattctactgcctctcttggcatggaaccttctctcaccttctactgcacttttctcttggtactcatattcaggcggctcttagaccacatgggttaagagtctgggtgttcatgtcttgctggccactgtggagtctgacactggagctcatggaggaattaccaccttgcttattgtcagcttgactatttggtctttcaaatgttactttgcttttcatttcttctaagaaatagctctttcttttctcttttaaactttaccaaaaaagaaaagaaatagctctttcttttctcttttaaactttaccaaaaaagaaaagaggggagaggaggcaccagtttcccccagtggatatttctcctgagaaaattcagtctcgttatcaggttcattctttaactacccatgctttttacttccacttagcatattttcagatgtctacttagatgcacagttctacaaaaacagaattttcgatttgagattacattcctcaaactcaaatcacacttattcttggagaagtgatctttataagtgatagttttatttttaagcataagaagccatgttaacaaaaatacagcatatttaaagatgaagacattaaataatatagctaaatataacaattatcacgtctctatacaattttgtttcacctttttttttttgtgctgaaaagactttcatcttcttgaggcatacaaccaattttgtttttgcttaatccatgtgcattgcacatgggctctaggggtctgtgtttgaggtgtgcaggtgcagtgctggtgataactcctagttactgttatcattggtgggattgagttagaaggcagcaatgattaaaacgaagtatggacataatttattactacatgcaattaatgccatcatttttacttttctacatgtataaaattagggataatgtttaggtctggatgttttaagagcaggttttagcttttgctttttaacattcttttattatagtattaaagcagtaaaagctaattaaataagcctttttcagttgcttactgttggccaaatgttaaataagtaaataacaagatgatcattttactcttaattgttgcagttttaatccagttcagaattttgaaattgttttctcttgtgtttcttttccagaaaacacgagatttttctcctatttcagcagttggccacaacttcattgctgggaaaaggtgatttcaaagtatttatttatctggtttattctacattattactcattcaaactggcttttagtttaactttgcatgcatcagttgttgatttggagactctgtttgggttaagtctgcagacacacagcttctaagctgaaaaacatccagggaatgagcttgtctgatttgaatttagcaacttaggtcttctgcgatagaaaccaagacgccaatgggtatacttcctacaacatggtgtttccctttgattggtggtaagcccatccatggctgagctttgtaaagcctctgtgaagttgggctaaatgcctactctgtctcaatctctttcctcatctttgagacagggataataattggatagtctcatgggcttgatagagagattaataggatacacagtgctcactgccaccaccaccaaaaatatacgaggctgtgtttttggttatcattattcatggtattaataatctcattttgtgctgatgataaagttatgttaataattccttaataaccttgggtcatcttctgcgaacagaccaaatgtggaaaaatcattcagactaaatgaacaggttaacacaaagacattctgtcttttattttagaaattcatttactacaatggttatcagtgtttataatgaatcctggacttcgaagcactatgtccacccatttgaaagatttattttacaaacctcaagtgttatggcctgcccgactcatattcattttaaatcattatccaatgcctgtatggcctggaaaggaattcatctggtctaagttttcccaatctcttcaccaaaggaatcttgtaaaataggccactgtcttttaattaaatctttgcttcaacttactgagaaattccttctcttgccagagtaaccctttcctcttaggagagcagggagctatttcagggttattttggttcccctctgaggccacagtctttctaaatataactgcagatcctggaaatcagcctgccttttgttagttaacttaggctaaagaatcagtgcattaagacctttgattatccacattctaaaaacgccttcctctgatctcctaatatttgacaagaatctcgattcagggattagacattttctctaatgcatttccatttccactagagctgctcgccttacacacattatggcctgaaatgtagagcattttccggttgggggtaatgaagatttaactcaagaatctatatactttagaataggcatcacatgtttctgtaatagaatcacattcctcccaatttctggaaagcgttgtgtggtacttttttgtacatggctgacttcttgagttttactccatctgaccctcctatagaagctaagcttgaggtcaatgtttgtatcttattttagtacctacaacatctaataaatgcctggagcatagtaacacacagtgaatgctctaatttctttaaatgaatatatctctgacactaaagaagatagaattcatgaaaagtaatttatctcaagctgagctttttttctgactagatataagcattcttctcaacaataatgctttgcttgttattttcgccacattaaagaagtgccaccaaaaccaatttatgtcccctttccctcttctgctgagatcagaactaacatggtggctacattcttttgaaacttgtaattgtgtgtcatttccacagtggaagtagattcagacagtatctgcaccaactttagtggtaatagtagcgactttatgatgttttaatttgaaattcaaaattttaaattgtcccaacccattttcaggcttccaatgtgcctgtgccttggaaatgtatttcaaacttccatagttgttctttccagttattagaaacataagcaaagcaggctgggtgcagtgctcacgcctgtaatcccagcactctaggaggccgaggcgagcagatcacttgaggccaggagttcgagaccagcctggccaacatggtgaaaccccgtctttactaaaaatacaaaaattagccggacatggtgttgcacacccgtaatcccagctacttgggaggctgaggcacaagaattgcttgagcctaggaggcagaggtttcagtgagctaggattgccccccaaaaaagagaaacacaagcaaagagaacacagaatcagcaaccgtccagggagatgtgcactcctaagctgaattaacaaataagtgtgtttcttgagaggccagagttaacacaattagtgatgaactgcgtctttgaggagctaggggaaaataatgggattcatttttaattcaaaccaattctaagcaagagccttggctttctggagtggctttgtaatcaaaggttaccgcagggcttgtcagaacttttaacaactgtctccactgtgaaaatggtcttaagttgtaaggtgattgcagagctgaggaaatgatgactctagccagcttttgtctcgcatttgatctttggctcacaaagacgaggttaatttcagcataagctgttagctttattttttaaatcagtcaattttaatagcagcctgcttatgccctgaaaaacatccaagagcagtaagaaagagttggcctggaatataaatgttacagtataaatcttagctatctctaggccagtagtcaacaaaatactttgcagtcagtctaattaatctttcattttctttttgctatccttccttgtgtttattgtgtgtgtgtgttttctgaactataaagcatatacatagtcacgatagttggaaaatttaatactctcaaggaagaaaaaagtttccttgtgaatccattacccaaagagaaccattgttagcatcttggctggtacttttccctgagaatttttcccaggcaaacatacataatttttaaattccttttggttttgtttgcttttagagacagggtctcactttgtggcccaggctggacatagctcactgtagcctcaaacccctgagctcaagagatcctcctacttcagccttccaggtagctaggaatacaggcacgtgccaccatgcctggctacttttttttattttttgtagagatggggtctcaccatattgcccaggctgatctcaaactcctgggctcaagcgagcctcccactttggcttcccaaaatgctgggattgcaggcatgaaccaccatgcccagcctcatacttttaaactgcttatgatgaaaaattttatacacacacgagagaatcactgagtccttacatattcacagtctagattcacagagtatcaagattttgccaccatggcttcacctatcccttttttctttctccctttctctttcctcttttgaaatatcaactaagctacttttaagaggaaaagatgactcttgatattctgaggactatggaaagcaagtatttgcctgccaatttcacatattctcacttatcctttattaggaagcaaaaagtatggttttacacttcatattgtattgtactttgggaataagctgccttaaagctcaagtctattgcatgctagatgggtattgatttttcctcttaaatcaatgtttccctagggcatagttttatttattcataaagctaagatgatgtctgacaggagttacagcagtgtaaatctgtggtgcaggcacaataagaagagcttttgtaacactcaaaaatccatgttctgatgctagagggtatcctcataagcctgaaaaagtgcatttgcgatgcttgcaagtgtaaaaggaacatttcagcatatcgttaagttttactcctctgttttctatgctactttgcaaatggacctaaatacattgtgactgaagccaagccatgattgtgtctgatgcacaacgggttattggaacagcaggctggatagaatcaaagcttcagccacaatctcttgttgacaccaaatgtcagcttgctccggaaggatgtagtggccctgttgatctgtcccctgtaattttgctccctggcccaaaggatgggcacttctgcccaaggggcagttaacatgagaatgttcactttgggatacttcattcactttggaataaccctatgtacttgttggtgtgttatagtacatgtaacagctctctgtgtagctaggccatgtaagtcaagtgtaatcctaaaagtgtactcattttgttgatatatatatatgacatatgatatatatatgatatatataaacatatatatacacacatacacacacatgcatatatatacatatatatataaaatacatagtctattctgttttaaaagtgtttatgatattaaaattattgttagacttttttaacttaaagaaaatatgccctgacttttccctcaacattaactgatttttttccctatggttgaaaaatgcttctaatgggtagaatggcaccatttggaattttaaatatccagttttttattagcagtctgatcttagcacagtagaactggctggagagtcaggtgacgtaaaagctagtttcattatccactcttggctgctttgtgacctatggcgagtttctgaacttctttgggacattttgtttatattgttgtttttttcccctaatttaaacagcagtgagtttgtgagaaattggcagatttcacttcttgatttccatagacttccatacatcaggactcttccgtttgaaagtaactagttgatatttaaaaaaagaagaagaagaaaaggaagtgaaaagagaaaaaaaagaatgcagaagtgaggattatttcttcatgaagaataaggtttgttccagttttaaaagcctgtgacttctctgtgaaaacattgcagatgattagctcagctaccaggagccacacagttttcttagaaattgtgccattgaggacaccaagggggccagggaggacacagctccagttagaggctggggccttgagcgcctccccccaagagcagctggtgctctgccaggtctgtggctcccaggatgcccagatcccttgccagaggtttgggagaagccttaaaggtgctgtctcttcggatctctgctgtttcctctccactgatagctacattgggagcctcttcagaggaggcttctaggaattagaagggaaagcatataaatgccattcactacagtacctgttcactgctggtcacagttgttctcctttgcctcatcagcctcaggcatggagataacctggtggcatgtcagtgtcttcgagtttttcccattaagctccaagagcattgattgctattcacttcatgaatggatgtcttgagaagatcgtaagaactacttttgaaggaccgaggctgccgtctctgcttcagtagaaacccgaggtgcctgacatgaaaagcacactagaggacctatttgaagaagagagagttagctgtttggaatctaaccgtttatgttaaggtctgtgtgttaggttttctagttagctttagtcaagtccttcaaggtctttttttacattcttccaatataatctgctttatattctttaatagtatgtttttgctcttttagcattaattaattatgcactcctataggaagctgattaggaagtcatcctccttgaccctgtgtttggttcctttagagcaggggttttcagcctttgcaggaaccaggccacacagcaggaggtgagtggtgggccagcctcctgtcagatcaatggtggcattagattctcacagaagcatggactctatagtgaactgcacatgtgagggatctaggttgtgcactcatgatgatcttagtggaacagtttcatcccgaaaacatccccactccccctgcctgtggaaaaattgtcttccatgaaaccggtccctggtgccagaatggttggggaccactgctttagaggtcctcttggctccccaagtcaaccccggtgtggaagctaaagtaattctatcttgtaagctaatctaccatgttgacttcttattaacagttccaggaatgctctgagatctccagtttgtcttttgctccttgtgtaagagcatatacctaccataaatcctgcccttagagcagatcaaccttgacatactggtacttactataaatcctgcccttagatcaaattcctcctcatttcctctggagcatgtgtaccccttccctgggtatataatccttgggtctgggggtctaatgacgaggagatctgcttgtcatgtggctacccaagaccatgcccctgtccgtaagttccccaataaaatcaccctgtaatgacaagagggacttgtctgcctccttctttggttttttgactccttctgtgtttgggggttgctttgcctatatgaccttttcgtgaaacacctggtcattaatggagtgatactttcacagccagacacctgtcacatccaaattactaacataaggtgattttgaatgctggatttctaggatcaaccacaggttctagtacttaaaaaaaaactttaaaaaatgttttttagagactcccactccgtcttatgaaagctccatcctcaccagtggagaaagaatttccctgttgggtctttgtgtcttgcaggtggccagaggtgctcactgaggcctctcctgttcagtcgcagagagctccagaccagtctcttgagcaaggtttaatgaagctgtggctgccttccatattcctttttcatgtcatgaaaaaagatacttcttttgtgggcctgccactttaggaataaaaaccctccctcaactgcttagtaccaatattgccctaagaaggaagtacctggctctcatggccttatctgagcctcgaatagaggagacccacgcaggctggaatggccctgcccaggcccactgggagagatgactcagttccaaatagggctttcattttagatatttaaattccaagtttctcatagttattcatgactaagaaaaggggcagctctgcactattccttcactcacatatttccttcctttctcttttttcatcatcttccctttctccctttatttagtggatttttaaaataaataaaatgctgtgtggcatagcactttgccaaacaggaaactctcataattttgtaatattttctagaatagattttagaccagccatagtgaaatttaattatggtgctaatgtgcttctgaagattcctgataaaagacttgtgcccttaatcccatcgactcaagaggccgaggtgggaggatcacctgagtcctggagtttgtggctgcagtgaactatgtactccagcctgggcaaagaaaccccatctcttaaaacaaaacaaacaaaaaaaaagatttctgttgagaggataaagttaaccctgtctatggtggctttaactatgacaaatcagccagcagtaaattaaataaataattttttttctagtgtttcttataagggaagaaccaaaagattgagatttatgtgaaaaatgaaaaatatctgataatgggatagctggaaaacttagaaaattagaaatgggtttgcgatttcattcatgtgatcctttgccattacccatctgatgccccatagcccaaaggcatgctgccaatatgaatgtttacatgtattttttatagctgaatatatatagtttataaaatggatatataccattaagatgttgttagacaagtattaggccaaacaggttatgtttgcagaaaacaagtgtgaatgcaaggagtttagtgtgttcttaaacttctgctaacaaaagaacttccatttacttttacagagttaagtttgcctcctgagtatatgagaatgtggcataggccacagatagcacctcagaattgatgtcgactggtgactattgcgatgagtgtgggtgcttttatagataactgaggtgttgttagctgaagtgtcaagagtggctggattgtaattgttgactcattttaaattgctttgttttataatctcttaatataataaatatgtagtattttaaaatatgcctcaaagacaccaaaaatgatgaaaaccactgaattacgagactaaactgctccctcccatccctcccatttgctgtctatcatccttttcccatgaaagatggcttttataggttgaaagcatagaggatggctccttcttgtcattcagatctccgcttacgggctaccttctcagagaggacttccccaagcatccatggctcaggaaaccccataagacactctcacctttccttttttacgttttaaatgttccctatctggtactttggtgctagtcttttgtcagtcttcacctacaaggtgctaagaccccatctgttttgttcaccctgtgtcctgagtgcctggagctgtacctggcattgagtaggcattctttagatgttccatatgcaggctttttcctttggacctacccctgtgcctgaccttgagagcatttcatcatcattgcctagaatcaggcccttgttttggaatctgtggtactgtattctctgaatttctgtcattaaccagcctttactccctggttgcagcatctgattagtatgatgataacacaactactgtatgtcaacatgatgagcatttgtggcaagtgagtcctatcaaattttccagccacaagagagcttaagaaaggttttgagagagaaatgtgtagacatttaagtctttcctatgctggtgttaaccctcaagatcaattggccagaatgttctgctctgatggtagacctgagtaatagcatgttgtagcttccttttttagtactgttatttaatttacccccgtgagtaatgctataagaaggaaggctttaagaatacttcacttctcatcccccgacttccagcccagtagcctgagtctaatcttgttatgtctgggaatagagttactagattttctgctaatggctgtattttacatgataataaatccagtcttttctacaaagtctacttaatttatgcaaaacagatataatttggaatgtgtatgaatgaagctattctttcaagggagcagagaggctgctgtagagcctgttaaatacaattttatgggccctcatgtcaggttaacacaagcaaatgttggttctgtggtcatcaaaggtaatgcttattggatagtttcaggtaaaacaaaaaacagcttttgaatctcagagcctttgctacttactccctaatttaagctcaacttgttttcaaccatctttcacactttgaagtagtgacctcttatacattagtggcctcaaagtattagtgagactcctgctcattgattttcaataatatagagaaggtattccaaactagttctggccattaacagagcaaaggcagtaaattaaattagcagggggatatatcaaaagccttttgtacatgccataaagtctccaaaatctaatccctgagagaaatttattttgttctggaaagaatagctttcttctattctaaaatacctttcatttataaaagaatggattattgcctgtgaatggaatagcaggaattctcagtcctttaattttgccatcaacttgctgtggtttatctcaaaaaaataatcaacctgtaagaaaaacatccgtggctgctctgctctttgacttttaggtagagttaattgtatagattaatttaaaagttaggtgtactaattaatagttacacatttcagaagtccttagctcagggtatttattgatttttgtctcttttgagttttataaaaaagctagatgcctgaaaacactgaattgttttacaatgctaagttaagaatgagtaaccctgccttcttactaatggacaaaattttgattttttgatctaatgccagtggtccagtgcagaaacacaaatatttacttgcttaatttggatggataatcagattttttaattattttcagaggcagggggttaaaaaaatacttaggctttttttttttagatggagtctcactctttttgcccaggctggagtgcagtattgcaatctcggcgcactgcaacctccgcctcctgggttcaagcaatcttcctacctcagccccccacaagtagctgggattacaggtgtgcactcccacacccagctaatttttgcatttttagtagagatggggtttcaccatgttggccaggctggtctcgaactactgaccttaagtaattggcctcccaaagtgctgggattacaggcatgagccacaacacccagccccaaaatacgtaggcttttaaagcaagataagtgtgctttagggagacctttttgcagaggctgatttagctatggggagataatagactccttcgagaagctaatgaatattctagactgtctgaagaaagacacatgcacagaaaatttgacataattgcaggtagtttacagaccctctgaaagttggccaagatcctgttggcacctatctataggactccaggcaaacaaaccctgacttacttcttccaagcaggaggtatgtttaattttgtgctgtaaatactggtctttcaatttctggtagtaacataacaccccaggcatatttgaattttataaaatgctgtaatatttttatctaaacagaaacaacatttacagttggccctctgtatctctgggttccacatccatggattcaaccaacctctaattcaaagcattcaaagaaaaaaaaaaaaagaatgtttgcctctgtactgaatgtgtacaaactttatttcttgttattctctaaacaatgcagtatatcaactacttacatagcatttacaatgtattaagtattataagtaatctggacatgttttaaagtacatgggaggatgtgtatagtttatatgcaaatactatgcctatatatatacttaagtatatatacttaagtgtctggggattttggtatctgaggggggttctggaaccagtcccccagataccaaggaacaactgtatttaatccttttgcaatgaagtatatatttaagatgctgacaattattattaaagaaatagttatatagaacacttattgagttaagaagatccattttattttttgagacaggatcttgctctgttgcccaggttggaatgcaatggtataatcatacctcagtgcagcctccaactcctaggctcaaagaaccctcctgccttagcctccccaagtagctgggactacaggtgcatgccacgatgcctggctacttttttatctttcgtaaagacagggtctttctatattgctcaggctggtcacaaactcctggcctcaagtgatcctttcactttggcctcccaaagcattgtgattacaggcatgagccaccaggcctggcctgaatttctaacaccagctttaaaagatcttgctctggtgcccaggttggagtgtaatggtgtaatcatacctcagcgcagcctccaactcctgggctcaagcgatcctcctgccttagcctcctacaggcacacaccaccagctttaaaaggacccccaaatcaattctattgttaattttcagtctgtctttcccctaagtggggatgttaagaaagaaaatagtatcagtttttattaccacttgcctggcattttttaatttgtttttcccaagtattcctagtaaattttgctttattctcctttatgtacacacattgaaacctgcagaaggatggtttcttttctttgtgctgctgttgttcaaaactgctataagaatctacaggtccctttttgggtccatggtagattatggtttaacactcatttaatcttagcaggaactaagattaggattggggaaaaatgaacaaagaaatctctcaccaaacaattcctatatatgcaccaatgtccagctcaaatctcccttcctctgcaaaaagttccctaatcccttccatgtcacatctcttggcaagtttttgatacctcccttaaggcagtatttactgttatcagtaaatactcccttctgctagacaaggagtttaactaatggaactggagttatttttgcttttgttattgatatgtaaaacaatggctaccaaaggatttatatatatggtggaaagaagtacaagaaaagtcattaacttgaaaaagggatttacgttataagtaaaagactggactttgatattctagtacattttaccagtgatactatttttccaaacatttctcaaaaatttaataatcacatgaaacatactcagttattttttttattatactttaagtcctagggtacatgtgcacaacgtgcaggtttgttacatatgtatacatgtgccatgttggtgtgctgcaccgattaactcgtcatttgcattaggtatatctcctaatgctatccctcccccctcccccgaccccacgacaggcccctgtgtgtgatgttccccttcctgtgtccatgtgttctcattgttcaattcccacctatgagaacatgtggtgtttggttttttgtccttgtggtagtttgctgtgaatgatggttttcagcttcatccatgtccctatgaaggacatgaactcatccttttttatggctgcatagtattccgtggtgtatatgtgccacattttcttaatccagtctatcattgatggatatttgggttggttccaagtctttgctagtgcgaatagtgccacaatgaacatacgtgtgcatgtgtctttataacagcatgatttatagtcctttgagtatatgcccagtagtgggatggctgggtcaaatggtatttctagttctagacccttgaggaatcgccacactgtcttccacaatggttgaactagtttacagtcccaccaacagtgtaaaagtgttcctatttcttcacatcctctccagcacctgttgtttcctgactttttaatgattgccattctaactgttgtgagatggtatctcattgtggttttgatttgcatttctccgatggccagtgatgatgagcactttttcatgtgtctgttggctgcataaatgtcttcttttgagaagtgtctgttcatatcctttgcccactttttgatggggttgtttgtttttttcttgtaaatttctttgagttctttgtagattctggatgttagccctttgtcagaggagtaggttgcaaatttttttcccattctgtaggttgcctgttcactgtgatggtagtttcttttgctctgcagaagctctttagtttaattagatcccatttgtcaattttggcttttgttgccattgcttttggtgttttagacatgaagtccttgcccgtgcctatgtcctgaatgatattgcctaggttttcttccagggtttttatggttttaggtctaacatttaagtcttaaatccatcttgaattaatttttatataaggtgtaagaaagggatccagtttcagctttctacatatggctagccagttttcccagcaccatttattaaatagggaatcctttccccatttcttgtttttgtcaggtttgtcaaagatcagatggttgtagatgtgtggtattatttctgagggctccgttctgttccattggtctatatctctgttttggtaccagtaccatgctgttttggttactgtagcctcgtagtatagtttgaagtcaggtagcgtgatgcctccagctttgttcttttggcttaggattgtcttggcaatgtgggctcttttttggttccatgtgaactttaaagtagttttttccaattctatgaagaaagccctttgacaaaattcaacagcccttcatgctaaaaactctcaacaaattaggtattgatgggacatatttcaaaataataagagctatttatgacaaacccacagccaatatcatactgaatgggcaaaaactagaagcattccctttgaaaactggcacaagacagggatgccctctctcaccactcctattcaacatagtgttggaagttctggccagggcaatcaggcagaagaaagaaataaagggtattcagttaggaaaagaggaagtcaaattgtccctgtttgcagatgacatgattgtatatctagaaaaccccaccatctcagcccaaaatctcctttagctgataagcaatttcagcaaagtctcaggatacaaaatcaatgtgcaaaaatcacaagcattcttatacaccaataacagacaaacagagagccaaatcatgagtgaactcccattcacaattgcttcaaagagaataaaatacctaggaatccaacttacaagggatgtgaaggacctcttcaaggagaactacaaaccactgctcaacgaaataaaagaggacacaaacaaatggaagaacattccatgctcatggataggaagaatcaatatcgtgagaatggccatactgcccaaggtaacttatagattcaatgccatccccatcaagctaccagtgactttcttcccagaaacatactcagttattaaatgtatttaactatcagttattgctaagatggaattaaagtcagttcttaatttttcaaaaaaaaatgaaccccaggatgaattcattcatttcattcatttaccaaactgaattctccaaatgtttattttataccctgaaatcagttcctcttcctgaatttcctatcccagttaatggcactgccatatgggcaacatagtgagaccatgtctctgtaaaaaaaaattaaaaattagccaggcatggtggtacattcctgtagtcccagctatttgggaggctgaggcgggaggatcgcttgagcccaagagttgtaggctgcagtgaactatcattgcactgcctcactccagagcaagaccctgtgtcaacaaaaaaaaaaaaaaagaaaaaaaaagaaattaattcagtgatgagttagtgtcttggacaggactgaccttggcttagtcattgtatcctgaatctattgatgtgcctcaaggttataataattataatggccacattgggttctttctacccaccaagggcagtgataaaagtttcccccttctcccatccagtcttcatcatgagcttttgaaatgtaggtatgattgagagtgaggagtatagggccgactccttgggctggaatcagacctctttcaccacttaccagctgtgtcacttagacatgttttccggccccctgtaccttagtatactcatctataaaacagataatagtatctcattctgaggattgataggaatattaatatactcttttttttttcttttttgagacggagtctcgctctgttgcccaggctggagtgcagtggcgcaccttggctcactgcaagctccatctcccaggttcacaccactctcttgcctcagcctcccgagtagctgggactacaggcgcctgccaccacgcctggctaatttttaaaatatttttagtagagagggggtttcaccgtattagccaggatggtctctatctcctgacctcgtgatccgcccgccttggactcccaaagtgctgggattacaggaaaatattgatatactcttgaaccctgtgcctcgtgttagctgttagagtcattatcctcattttgcagtcaaggcatctgagcctcagaggttaaataacctgccccatttctcacacagtcagtataaatcagagccaacgttttggaaccatctgtctgactgcaaggccttgtatatgggatatatccttattgaacagaatgggaattcacaattacatgttttcaaatttcttagcatagaaatttgccttacgtacatatgttcttcctgggtgatcttgtccattccaagggcttcatttgccatctaatttagggttggcaaactatgacctgcaagctgaatacattctggcacctatttttgtaaataaagttttattggaacacaggcacactcgtcctttagctactgttgatggctgctttcgtgcaatagtgtcagaggtgagtagatgtgagagatcctatggcctgcaaagcctaaaatgtttactctctggccctttacagaaagcattcgcataccctgatcttgctcactactttcaacctttctcataagatcttgattcctaaatttagccacccaccaaatttcttcatgccccatatctaccttaaaattaacattttccaacctgatttcttcaaatgtccatttcccaccctgaaatcagttcctcttcctgactttcctatcccagttaatgacaccaccatatgcccaaggtgtatctcccctttttattgctcatgcctgatgtcttcaaaagggctgttcattgattatcctaaatacatacactttttgaagacagtaacctaggcttttaagtaaccaatgctgatcattctagtattctcagtccccatgtgcgattagaccagaaattcctttgacagtctgtcagaagttgctttaaggtatattcagtgagaaataactatggtctgtctctgtcaagtaagccatggaaatatgaatccatttctcgactttagatactgtttcacaagtaagaattaaagaatgctagaaagtcagaatattgtaaaatgtgtagccattactcaaatatatggaaaagaacacaggtttatgacttattgagttgtcacttcaaagttattcgtcattaatgttttaaaattaaatctctattctttattcagggcctcattggctggcagggtaagaagttaaaattctaacatcagattatcattttttcttgttcatccaaataatatattcagataatacattcatgttcattcttatcaatatcacttgaatattattccaaagcttatgatattattaactctgcattctcttttatgaatttacaattacaattatgctataataactgatgaagagcacagaagagcattgtaaaaataaataaactttgaaatacgaaaggattagtggggataataaatatccgctcattgtcttatcatctttgatcttggcatttgttctatccagcaaatattttcatagtactttaatttcagtttctttatctgaaaaattatgcaggagcagcctttgttttccaagaacaacagagatgtttatagcatttaagtcaaaagcagagataataaattaattctaatcctctgagcaaagacattagcttttgtgtagcacagggatttgggtttgttcacacaaaataatcccaagaataatagttcccggtgctcacaattgatcttaaagattaatatatttctgtggttaatgattatgtaatatattaataagcttctccaaatacttcctgaaattttaattatctgtagacttttaaagctatattttgatcagacatgtaaagaagcagtgtagctcaatcactgtcaaattaaggatgattttacattctgctttagagaaaaatgccacccaccatcagtctgcaaaatagctgaaatacttagaagaaaaaaagtaagtagttaaggatgtctcaatgccgtttttgtcaactagcctcatgcagtggtgggggctactgaacttacaatttcactctgccttctgctgggagtgcaggtgcccttggctggcctcccacctaagctagaggtggcacttaaagtctcgacacagagtatcacataaaaatcactttcaagtctttaaataggttttagctatgaaaatgaaaatttggaaactactttcttcaacaatgaggacgtgactaaggatataaaaatatttaatagtttatagtcttttttttttttttttgagatggagtctcgctctgtcgcccgggctggagtgcagtggcatgatatcggctcaccgcaagctccgcctcccgggttcacgccattctcctgcctcagcctcccgagtagctgggactacaggcgcccaccaccacgcccggctaattttttgtatttttagtagagacggggtttcaccgtgttagccaggacggtctcgatctcctgacctcgtgatccgcccacctcagcctcccaaagtgctgggattacaggtgtgagccaccgcgcccggccaatagtttatagtctttaaaatgatttatgcaggctgttttgaaacatagaaatgcattttttacgtaactgaaaatggcacatgacactgtatttgctgatggcaacttgctaaatatttacataaaatcaaagatcaaaggaaacatcagagtacaatagagtttaatgttcattgttttctctgttttctataaagttgtttaactttacaaaaattgttatgacctgtttgtcttaagaatgtaaaaaccctccttttctcatcattctaatgagaaaggatgttcagtcgtcctaatgactgaatttttggaatgaagtctttttataaattaggtctcttctgatgtttttctttttctgggttgccaaaatcttatatatgtgcaataagccaaaaaaggtgggaagatgaacagaagatttagatttctaattaatcgaacacaaatagagaaatacctaagtagatgtgccattctatagaaatttatgtgacagtttggggctgatggtttcaaaaatcttaagtcgtttttaaagggcacctgcctgtgattcatataaattaggacttctctgttctcatttttctatttcctcttatcacatctaacagggacactaatccagtagtgctcattttacataagagcagagccttcaggcttaacttgggcatgtgatagagctggcatcacgtcatccagcccagcactcagtatcagagacagcttacagatggatggagaaaaacccactgcataagaaataattctgcattcattaagaggcatatatatgtataagctttatctcaagaaaagtaaaatgtaagacaaacgtaaagtcaccatcctgtagagaaagagagtgatagaagaatatgggcaactcaaattcactttggccaccttctctacttgttcaattctgtaagactgatgattctgggaggctgaaggcagtgagtttgtgtttcctttggaatgagcacatgttctactggcttctgccagctcatgcagcaggaatgtgaggatgcgattgcggagttgactcaccagctgatggactcaagcacctacttctctcctttcattgcctcagtgggtttctctacattatctcactgggtttacttgtctttctgttttcctatctggaaggaatccaaatgccttaaatccaaatgtatttaccgcacatgaattaacttatagacaaatacagatagaaaggactgtgagtaccattttttttttatttcaggactaagctttggtctctcccatgtcttatggcattttatgacagctacacttatgaaggggtaactttatactaaaattgtggcttgagaactgcaacatggtgctggaacctcagatctctgtgattttagatgcgtaaaactcaaaactgaatttcaaagagggtcttctccagccaccttcttaccactcttcctgtgaatgtttaaatctaagtttgctttattagataaattctgacatttgggtatatgaatgaggtagactaatttatgtgattaaattctcattcatttaataagaggattaaatgcttcattgcaaaatgctgaaggatatttttaatttacagtctcaattttaattgcaacactatcattctgttttgagcatcgaggaatagcaatgaaacgtgtttaagttataaagtaatgattatgttgaattaattttaaggcagttttccctagttttgtttttataggaaaaatatttacaagttaatttttgtttttatccatatataaaatgaaaatagtacattaaacatgccatcctgtgtcaaatggggcagactcggggagagaccaggagagcagggagggaccttctccatccccagtcccagcgtggggtttgttgtatggtaggtactcagtaaatatttactgaatctccaaatgtatgattaactactgggagtcagcagtctagactggagtaccagccctgttagtcctcagtaatatcactgaacctctcagtctcagtttccccatttgtaaagcaggcatggcaatgtttcctgtcgttttaatggaagactgtgagaattaaagggaaaacgtggcacattttagaaaactggaaaatggtgatataaggaatcctttctagcattattattttgctatgtgctgcttattagtgcccagtgtttgttagtattagcatccagttagcattcaacgaatgcatatttaaaataagctaatgcactcacagtaaaattgaggacacattagcaatttatcatacattatttgacttagcattttttaaaccctatatttatttaggtataattgtaattcctttatgtgcttagtttacttttgcattttcataggtggacattgaaaaacatatatagacaactaaatcattatttttctgcagcattgtacattaatagctttttgtgtacatgtgaataggagttggcaaaagaatgtagcacataatataaaggtttaagatgtaagtaaatgagaagctggcttattgctgtcacttctttggaaattagattagggcatatatcacattaaattcacttttagatatgttgtgaagctaatgacagggctttgttgaagtgagggtttgtgggttttgatgaagaaaatctatcggtatatgccttatcttttattctctcttcttgctcaatgtgtaattaggtttgctctgcaggatcacagtatagagcatatattaattttatattcaccctgcctgtaatgattgtatgctagcacttctaagtgacaccaaaaatgcattaataaagtcataatcgttagccagaatcacaagtattgtagtcctaaattttgctttattttctctgtatgtccttaattgatgatgtattaatgattgaacccatttgagtttatttgtactgtatattatatattgcagtgaaacactgggccgcaaagacttatgaaatataagacaaaactttgtccaggcagggagatgggacacaatctcacaacagcttttaagatcatctaataaatgtatgtacatttatatatacgaatgatgctagcgtcgttgatgtaaatcataataatgacaaccaccctgaatttcccaagttctgagaaaaactgaaagataagataaaatcattgtcagataaggctcaaacatcacccttattatctgtaaaggccaggctgcagggcatggtttatttgttctcctaatatggaacccaggaattaagcacaggtcacagcggctggggcaggcctctctgggcccagagaatcaactcaaattatttgctggaggatcagaggagaattcatattcatggatggtagccctactccctgcagagagaaggcaagagctgagtccaggagatgcttccccaaattgcccattagacatgtatgtcactcaacctccccttgggtagagtaaatgaagagatggaaagagaggtattatatgctagaaatgtgtagggaaaaaagcattctcccccaatataagacaggtaatataatatttgatgtcaagtgaactgggcagaatctaagagcagaaggaaaagaacaagccttgctaaaaaggacagtcaggacttagagctaagtggtcaggggagaagggggaagaacattccagtcatgaatggtatcagcaaaggcacaagcagggatgaggagtttgtgttggaaagaagtcaaggctggtgaatcaggttacagagggctggaaagttctaaccacaggaactagggagttccttacccaaggagctttcggaaatggtgcatttgagtacttccttgtgaacatgtgtaggagaggtttacttttttctttatcctagaacactgaactctaacaatggttttcatatatttgcatgattctctctatagtttatcttggctaattacatttaactatgggctctccaattatatgttgaactcaatgactaatcatcagatttcgatagcaaagagcctataatttcctgagtgtatgacctatgtaaggatatgttgcagagagaagctgtttcctttaccatagtaaaaatttgtttgtggttacattagaagctacctctaaaagacatttagctctgagatagtttttaaaattgaagtttgtagtgtgtgtccatctgagtggaccctatggaatcctgcttaccaggtcatgcccagatgcatgagacaagagccttttgattttaaaggcttctgtttctgtttaagtgattattgtatacattcctccaaaataaagacttttctcaaaagaagacatacatgcagtcaacaaacatatgaaaaaaagctcaaaatcactgatcattagagaaatgcaaatcaaaaccacaatgagataccatctcacatcagtcagaatggctgttattaaaaagtcaaaaaacagatgctggcgaagttatagagaaaaaggaatgcttttccactgttggtgggatggtaaattagttcaaccattgtagaagacaatgtgttgatccctcaaagacctagaggcagaaatacatttaacccagcaaccccattactgggtatatacccaaagaaaagtaaattgttctattataaaaatacatgcacacatatgttcattgcggtactattcgcaatagcaaagacatggaatcaacctaaatgcccatcagtgatagactgggtacagaaaatatggtacatatgcaccatagaatactgtgcagccataaaaatgaatgaaaacatgtcttttgcagggacagggatggagcaggaaaccattaccctcaggaaactaatacaggaagaaaaaaccaaataccaagtgttctcatttataagtgtgagctgaataataagaacacatggatacatggggggaacagcctatactgggacctgccggagggttggggggtaggaggagggagagcatcacgaagaataactaatggatgctgggcttaatacctaggtgatggtatgatctgtgcagcaagccaccatggcacacgtttacctgtgtaataaacctgcacatcctgcacatgtatccctgaacttaaaataaaaattggaaatttaaaaaaaagaccttagaaacggggcttccaagagtggtcacaatcaattacaggattactacatagattttcttattccgtgcattaaattatgtttgcccaaaaacaatgttactaaaaagaaaaacattttaatatgaaactttgctataggtctgtcctgtacccataaagcaattgttaactctttgctgaatgctttgggtatcaaatggtgataagagaagggggaaagggcacatcagctgcctttcctatcattgaggagtttgaaatttcactggggagatgtgacaagtattcacatcataggtggtaaaaactaaacagtttatggataaacaccaggatgcctgcttttagtcatccaatgcttcatttattcagaaggcttgctaaacagtttgcaaagcattagagatgcattcttttgcctgatacactgtcaaatattactgccttgcacagaggtcattggattcactctggaactgatatcctctccaagaccaaaagcttggtaagtttttaggattctcttcttggctgtcattttatcatctgtaaaatgagggctttggaaccaaatgaatgtcttagttccttcccggctctaatatttaccgacttaagagtatccctgatgacacagagaaaaagaggagagaatcaggataatgtaagacaaaaggaaagttgtgaggtcgagttatgctgttacacgcccaatgctgaagcaataggatggttcagagtaaatgggcctgacatgagagatccttatctgtcaagttttctttcagatactataaacattacaggctgcagtatttttcttttttattaatgcagaaggtctattttattttgtctgtgtggatgtttgcttatgaaagaattggcttgttttaacagaaatccttttagtttgggatgggttgaatgaaccactcttttttaaagaaacaacttattgagatatagtatctttcacatactgtacaattcacctatttaaagtatacagttcagtggctttcagtatatccagctgtgtaaccatcaccacaatcaattttagaacattctcataactccagaaggaaacccctcacccctaggctgtcaccccacctccaatttccccatctcaccctccttccagctctaggcaactactgatctactttctgtctctagtgagctgctctttaatgaaggagacagtcagtggacatcagagactaagcaccatagtgcagctttatccagacacatctatttaatggttggagctgttagagtttgcagtagctgatggcaaaatctagtttctaagtgatattgaccagaagaatgaatgtcatcaaaaataacaacctgaaaatagccacaaattcagtgcttaggagagtactcttcagccattatcagtggagtgcttcagtcacttgcagtcagcctgacatactctacctcattacatgagacatgtttaacaaaataaaaaatcatgatacatttcttatagttgttatatttttatggcactggtgtatggttcacccagcgaaatcccactttggacattctgtgtgtggtgactttgctaggagatgttgaatggctctgctttcaaggagcagcataggagtggatgataggtatgcataaacaagcaagtgcaaaatagcagcaaaatactccaggtgcagcatagggggcacttacaaggacagccagttatgcccggggagactggtggggaggggggtgccagaaacagctcatggagaaggtggagctgcagataagcaatggaacactagtcatgcttagggaatgtgagaagcaaatttaggtagagggaccagtgtgttcaaatgcactgacataggaaacatcctagagcctttggatgtgagcagataagacagtagggtggttacaggagaggttgtgaggaggattctgaggctgtgcatcagtgtgtgaaaggggctatgtgagatctctaaggagttggacttgacccactgttttaatttcttgtggctgctgtaacaaagcaagcaaattgggtggcttagaacagtagaaatgtattctctcccagttctggatgccaaaagtccaaaatcaagatgtcaacaggaccatgttccctctgaagcctgcaggggatggatgtttccttgcttcttcctgcatctggtagcctcaggcattccttggcttgtggcagcaaaattccagcctttgcctatggcttcagatggcatttcccctgtgtctcttcacatctgcttccctctaggcacatctgtttctgtatccaaatttccaccttttatgtaaggacatcaatcctaatgggttagggcttaccctaatgacctcattttaacttgattacctctgtaaagaccctatttccaaatgaagtcacgttctgaggtactgggagttaggactttaacatttttaggggacaaaattcaacccattactgcccccaggcattcagatgttactgcagggaagtcaagtgttaatatttgcattttagaaagtcacttggagagttgtgtggaggatgaatgcaaaaggggcaagagtagttgggaacctcttggccttgaccgttcaagaagccttgtgggctgtttactttatccttcacactccagattcttcaagtttaaaaagaagaagaaaaagaaatctgcacatccacagcaaaactagaaagtcagggagaactaccatcagtggagaaggatatttaagaattcccagaaggtactaaaagaaatgaattgattggtagtgaaatccagaagaacaaaggattatattcccttttaccattacatactgtatattaataaaactttggttttaggtcagtaaggagcaggagaataaaatgaaaatgtgcatgccctttcactcagcaactccatgtctaggaatcctatctatactcactcatgtgctgagatatatatgcaggactaatcattgtaatgtcatttgtaattgaggaaaaccaaaaataatctaaatatccgttggcacagaatgcccaattatagtataaccacaccattcattgaatgttctatagttactcaaaggaatgagataaccctatatgtactgacatggaacattctctaacacacagtaaatgaacacaatgaaactgttgaacagtgactagtatagggtactatatatgtaacaaagaaagaaagactctttcgatttttgtatctttccagacctttttaaagtattgtactgaactctaacagtgcttacctgtgggattagggaatatagtgaaaaggaatattcttttttaaaacataatactctatatcctgtgtgttctgtgaactttttcagtaagcatgcagtataccaaaactggacatttactaaaacatttaaggagacagaatccatgagacttgagacttcaccagtgggcgaatgtggtgaacagtggggtggtaaagaggggaaagtagaggaggggtggaagggatgggatagggatagcatgaattcaaaacactcagaagcaaaagggcaacattttaaagggaactattaaaaaataaaaaagacagaaagtatgtattttattgtaaaaggggtctaggagtgttagtttgagaaataggaggatttatgcatcttcaactatgattggtggagcccatcagcataagaatggagaaacagtgccgtgagatgagagccagttgcagaaattaatgtcattcccagaatctcttctgctaaagagtgtatacagccaccaaaacagccaccaatgacttatccctagtgatccacaaattacatacaaagtaacacctcagggataggtacttatctctgaaatgggagggaaaagtctttaccccttctcttcattaacacctttacttgttcctgtctgtgttttcccatctccgcttgactctcctgttcctccttcccttcctcacccccctttctcttttacacacacatacacctacccaccccgtgatacaaatctactagcctgaacaaaaagttaaagaaagggaactcatagaagaaaatgacgtccaaatcagataagcacctccaaatgataaagaggaaaaagattttctgccaaaattatcatgtgaaaattgtcatggcctacttattttatcagaaaaaaagtgtgttaaaggtaatgttaacatagcagaaagcttgaaaaacaagtgacaaccatatttccaaatcagcttttatatgcctagtgttttgcagttagtgatcaaatgctttcacagcattatctcgtttgagcctcacactgaccctttgaggtaatgcttccatgtctttatggaaggggacactgagtcccagaaatgggcaagagccttgactggtgaggcatagactctgttttctatgacactctgatgcctgcatggcctcagcagagtatagttggtaccccatggatttgtctctcgagctaaacctttcagacttcatcttcccaaatcttgttctgtcacctgccttaatcttgaagaatcacagaagttagcaaagtatactaatctatgtcatttatttataaagcagagtggtcatttgaacaacaagaagtttggtagataaaggggataagattgcaccctttgggggaccaccaacaatagcttacaaagtaaaaatgcagaatttaatttcagagatagtgttacttcctcattcatggtactacttgtggatattatggtgagccgtgagcaatggagaaagagccaaagaaatgagattttgatcccagccagactctgaggtatttcctggtacctggcctacaaatattggcaatagttgttcataagaagaattagctattaattatttcactaattcgtagcatgcaatcctgaggttctccatctgaaggggagaaaatggagaaattattactaaatgtactacctaaaagaggtagaagtataaccaagaagtcattcagtgatatgtttactttttaaaagtttccagacataacactgcacaactgcagctttcctccgcaaagtcatcaaagagctaaaatgtacaaatgggaatagggatataaagtggaactgaagataaatggagagccacagcagcccccgcaatacttccctggtgttggttcctcctgggaccataatctgggctgacatcttctctccttccagcatctctttcaaataacatgaagatctggtaaatggccagtcaagcctctggctgctcattctggtaggtctgaggttagtttggctataatatatctttcttattttgtccctctattgtggttttgtatagattttcttgcctgtactacttcttaactaaaggatagttaccatggcaacacctgttgatgacagacaaaaaaaaaaatgtgattccacagggtggaggctgctcctatatttcttgctcctcgctctcacagttaagattcaaggggtgtttttgtttctccttctttcttcttctgtgggtgacactagttttctccattttggcagatcgatgtggaaactgctgtctgctgcttcagttttccatgcaaagatgcggccatgttaccctcgcgagcatttgttgtcatgatttttaccaactgtaatagacatcgtgcttttgtacaagggagtttacaatctttcacgtctgttttttccttctcctttcctctctttttccttcttctctttcctcttctacccttatttgatcaaccaggtgagcccatattccttctttgactagatagccaaaggtctgcagtagtaaagtccaaatttcacatctcatttaaaatgccattagtctggatatcaaaacaattaataaagtaaaacatggggtatacataataccaatttgttctataaacaaatcagtttgaaagaaatatattctagatagtaaataaatggaagagccttaaaaaataataatgtactgaagaacagtcgtatatgataactggttaatctcttcttatacatatgtagctatatcataaatattccacatttaagcaagcattttgatatgcctcatcgggacatggcattgcagaagaatctttggatgagggtttttgttgtttttttttaaggcaccagttctaacaccaaatcacctgattaggggaagaagcacaggtagcgtaggtgaaatggctaagccaccacaatggaggtggaggtgaaggtaatgaaaagtggcctgggttatgtttgtggctcagacctcagatagccgtgtgattacagccagggctcagtttccttgccactaaatttagagactgaacagaaatatcatggagtttgtttctaattctaaagtatattaatataactctgaaatatacataagtactaaacaatagaacagaaacatcattatacactaagggctgaaaaaatgtacatagagaaacagggtggactcataagcatgaattttgagtgacttttcaaagacatgaattaaccaagaggggagtctaagaaaataagtgatgtagcatatcagtcttaagatactgtgtcccagtaaagcaaaaaaattccctaggaattttggttgatataaattcttacagagctctttaaaatttttcctcacaattaaaataattattgaaagctgtttcattaagtatgctgcatattttttggtcattcatctctcaagctatcactggaaaaaatacaattgaaaatgcagattccctctttgaaattgtataatgaattgcgtgaacctacctgttattttgatgttcatttgaagttatataattaagaaataactccatatagcagatggattgatgtgtaaacctcttgatatgaggtatgtaaagtaatgagaattaccttccttaccctaatctctgtgtctttaagtcaggactggaatattaggtaacttgaccatcttttcatgcactgaccctgtattctagggctgccataacaaagttccatgaactgagtggtttaaacatccagaattgattgtctcaccattctggaggctgcaagtctgagatcccagcgtcggcagggccgtgttccctctgatggctctaggcaaggatctgttccaggtctgtctcttagttgcttgcagttccttgccttatggcagcataccttcaggcttcacatgagattctccctgtgtgggtgtccctgtgtccaaatccccccattttataaatataccaatcacattatatgggggcccatcctactctagtgtgacctcatcttaactacttatggtatatctgtgatatgctatttccaagtaaggtcacattctgcagtcctggaggttaggacttagagacatgaattttgggggacataaatcaaacctaacaggctcagaaaagcgtcacataggcacatgcacacacacacacagagtataagattctctaattgtggccaccctgtgaacatggactcttattagagtccatcatgatacttgtagttcttctaaacaccatattttaccaatcatactgtagctaacatttactgggcacttaactattgcaaaactcttgttagggtgtttaaacatacattagttcatgtgtcatttcccttcaagtgaatctccttgactatctctgtgatagtgagcattacatctcactgaatgtctcagaatttctctaaagttccatgtagatcatttagtagttactttccttcagagaaactaaatgtcatacatatgttagcatctcttaaaaccaccctaagtcatgcgagagtgtacacacgggcacattatcaatggcagagttctgttgtggtatctgcaagcagcattgaaagtctaagattgaagtggtcaaatgtgtgtgtgttctctctcataacacacacacatacatatatatgtactcattacatatatagagtgtgaaggagcaaggaagacacttcaaactactttatcccatatggtccatctgtaaaatgccaacctaccaacccccagttcacacacggccctgcatacccctctgaaactcaggcattttacggacaacaatctttcaaaatgtggaagctgccaggcgaataaccagagcttaaatgtctctctcttgaccccacaggcagagccattgcctcaggtcaacacaaacagcccagccagttttgcagaaccccaagaacggaggccagggtcctttctgtggctgggaagttaccccgtggctgggacttttcatagcagaggaacttcacagcagatttttgtgaatgtttggcatctcaaacacatacctgggcagacttcaagttagttactgaccccacaactttctcggcttcctggggaaagggaagtctttcttgcctgcccctccccgccgacatgcatacccattcacacaacttctgctggggcagcaaccctccaaccccataaccccttgagtgatccccagattagataacttagaagtcagagaactgtttctcatcaggaaatgcctgaggcagacctgaggctttgtgagagacaacccggtgttccaggtggctacccagttagctgcccatgatgcacaatggcaggatagggcatgtgcattaggccaagacaatcaaagctctataaatgacagctaaagtcccagtccaaaagaaagttcctaaatgtgcagagtggaaaggactggaataatatttactttttgttcattgtattcataagcaaggaaataacattgagaggtgaataaagaaaatgaacaaatgactgaatgaatatcctctgtagttgtgctggctattatctcatgcttatttacattgcctaaaagaagatgttttaaattctgtattttactatcaatttataagctaataattagaggagtcaatttatatgtcttctattcactaaagcaacatttaagtactgaatctaatcttactttgtattcagatgcctgagaagcatgctatagagcttctcttaaacacatcgtgctgcacattataaactattctattctgtgccaacaagaaagatttcttttcctgttttgaacacttcggtcatttgattacttctctgctgatattgaaactgcaaggaattcatatccaagccacacttgggatggatgcatacggataaggcttatactaaattatggcattttaagcctctttccaggtagcatgcttagaaatagaagatttttgctagtaaaatgtcattttaaaaaaatcaatgtatgtattataactgtatctgtcttacctgagtcctgtatgttgtagatagtataaggatacatcgttaaggatttttatcttcagcttcctagaattcaagaaaattatggtcctcttggaaaggagattacagagttttcattaaaccacaccactgaagaggatttgcagaaagaactatttttccggtgtcatacttataatctttttgatgcctaaagaaatctgattattattatattttgccttcatcttatcttcacagtggcctcttttggcagctctgtgaactactctttcttgctgcttccattttttctgtactcaacgaaaaaaaaataaaacccagaaaaccctcttttaatggactgctgctttgcatacatcagggatttcagctgttcgagtgtgtgaaaaatgaaacaggagacatcagatggcatgaagactagaactgttaacacagtaaataccagaaaggctgaaagtgtgagccaaagcagctggggagtggaaaaaacgagaggcacagctgggagaagcagcaagaaaaagcagccccaggaaacatgagggagcttagcagggggagaagagcggctgatgaaaacaagaatccgaggataagggaggcagaagcgttgttagttatgtttttccaatattgcacagtgcatcatagcccatatgcattgtctttggctacctctttaattgctgtgtcattgagcatatttaatacagttttcttgcatgattactatggactgaatattgaaatatcaatgaaatatctgtactttgaggttgatctctgttatattgataatgtactaaacctgtcagggaattcagacaggttaatgagaaatatcatgcattagtttaaggatacatttttttttctaccaaaagtatatcaaattgctaacatttagtatttggacaaataaggaatgtgtgtaattagctgggttaataactggtttggtaggcatatccagagagcactgattaataaattgctctcttcctgaagagaggtttttggtattttaactttatccagtcttagtccacattaggcctcacatgagtaaaactgtataaatgcatgccccaaagttgggagagatagcagatgtaaaaactgatggaaacagaattaggaccatcttgacatttaacacagtgacccaaatctaagaagcagaaatgtcacagggatcagtataaacaccctgctcccccagttaaattgcaaaggaacagtaaggagagatgaagcttagcagcatcatatttcacagaaatttagattttagtcaaatataaatgtatatacacatgtgttaatatgtgtttataactgtgtatatatgcatgtatatatatgttaatacatatatacacatgtgtatatatgtgtgtatgtgtgtcagggtagctgttaaaaaggcttctgtgatctttggccttctaaataatgtgggtggacagaaataagagacctgttccactcttcactgatgaagtgcttcttcacctggagaattgcctttgagcttgatcttttagaagagaacatccagaaaatgacagtgccagcccccagtacatctcctcctgccttccttgttccctcactatttgttcctcttgcatgtgccatcgttgccctccccaaatctgaatttgttctgactaaagcagaaaacactttaaatgtttaaacctaccccacagtccactggagcacatcactaattatactctctctgtgcctcgcccacagtagtatcttgcccaatgccagctgtgtttgtttgctgaatctcccatgttgagatgttattgccccagtgaacactaggatgactatgtcacattccagcgatgttattgtcatgcagatgtaggctctggtatcctaagatgattctcaggctcccataatccttactccttggccttccaagtttcagctgtttctgtgtctgtgtaaccaagcgtctgggactgaagatcctctttgggtctcatagtctgtgttggtcttgccaggtgatcttcttgagaactgtggctcttactctgagtagctgctcagtggctagattctgttgctgtgactagacctccaggatggtaatggacgaccctcctgacttcaccaacctatttactctttgctgatagctttgcctccctgcgatagctgggccccaaaaatccccacccaccgccaccaccgacacccaaataagggttatttcctaaatcaggtcgatgttgccttgttccttggaggttgtgcttggttgttgggctcccctcccaggttgggctttgtagctgcagcaggctcttctactctgctcttgtgagcagacctggccagggacccgctcccttctcctggcagcctttgtgttcttttgagttatggcaggtggtacatgaaatcgtattctttggaatagagaaggaaagctcaagagcaggggaagaggaacttctttaaataggtgtcttccagtatctgaagggttgccatgtcagggaactattggacttgctctgcatggccctagaccttaaaaccacgactcaaacaaggttgaagccactaagcctctggagcacagaagaacctttcttactcctagctcaaatttaacaacacttctcagagacagaaagggattccttgggatggaggaagccctttattgtggcagggaattcagcataggtagattagcaggtctaagttttgtttattggtttatttccattgcaacatagataaagtattgtatttactggaatgatgtttgcatgtgggaaatattgctgcagcagtatgccagtcatgagcagccggtaatcctactctcttctctgtcttcagggactgtgagtgagagaggttttattatagcaacatccttgagcctactctgatttttttaaaatgaattcactcaatcagtgaataaatattgagcaattactatattccaagcactgtgattcattccatgctcagtacgttgaactgttctatttaaccaagtccttttgacatggcagttatcgatgagatgtcacagacattgtagaaaggattcaagtatcaagtggggttgatttatggatgacctttaagtttcttttaaatttgagaatctgtaattgagtttcatgattctggtctcatactgagtagttatcttgcctccaggtacagtttttaaaagtcagacatgaatttggagtagattgctgaagtctattctcctcaatccctgtatttgtctacccagatagcagggagatacactctcaacatcattactccttccccagaagagactgttaggatataacctcgagaaaacactcctttccttagaccctcctcagcactgccagcgggggctcagcccaggccatctgtcaggtgcccatctcatccctcagggtttcagtgtcccagaatggagctctgtttcagttctgctgggtggctttagccagaacaagagttcaggttagtttggtaaaaacacatcctgaactggagttcacttgcttgggccttcttatgaatgtcatcattagtattaagaagtcaccaaccgtcctcatgaaaactgtcagagagccagatgtaacagaaactgctgggcgtggcattccatggacaggatatgtgggtttcagggagaggtcatgtttgactaaatcgtcagtatcagaagtcctaaaattccattcggtggaaaaagaaatcaatattgaaggtatgggatttctgtttgattgggtcaataatcatttgcagtgattaaccttattatctctataccctgataacctaattatctctatcacctttggaaataatcagcaagatgaaaggagacctgaagaagtgtttggtctatcagaattatactcaagttgtcccagtcagggcatgatagtttgcaatggagctaggttatctgcttagtgtaacaactcccatgattccagctaaaattgttttggggtttgccatttttttttaagactgatctgaaaaatgactgatgcttacttataacatccaaatccttggaatattatttttcataagagctttatttagatgcaattcacataccatacaagtcatccatttaaagtgcaaccatcaattttaggacattttcatcaccccttctcccctagccctaaggaacacaaatctactttctatctctatgtatttgcctattttggacatttcttataaacaggatcatataatatttttttgtgactggtttctttcacttagcatgttttcaaggttcatccatgttgtaacatgtaccagtattttattctattttatggctgaatactattcttctgtatggatataccacattttgtatatacccattcaccagttgaggggcattgtttctacttctttgggtattacaagtaatgcttctgtgaatatctatgtgcaagtttttgtgtggacgtatagtttcatttcttttgctatatacctgggagtggaattgctgggtcacatggtaactctctgtttaacattctgaggaactaacagactgtttcaaagcagctgcgttattttacattcccatcagcagggcatggggttctgatatctctacatcctcttaacacttgttattagcttagacgtgtttattatggccaagagcaaatcactaggaaggtatgaagtggtatctcattgtggttgatttgcactttgttgatggctacttatgttgtgatgttgagcatcttttcatgtgtttattgattatttgtgtatcttttttggagaagtgtctcttcagatcctttgcccatttttggttgggttgtctttttattattgagttataagagttatttatatattccatatataagtcccttatcacatacgatttgcatatattttctcccattctttgggttgtcttttcattctcttaatattgtcctttaaattacaaatatttttattttaatgaaatctagtttatctgctttttctctagttggcttgtgcttttggggtcacatgcctctgccaaatctgagctcatgaagatttagccctttggttttttttctaatagttttgtagtttacgcttttacatttaggtatttgatccattttgcattaactttttctgcggtctgagttaaggatccaactttattcttttatatatggctgtctagttgttccagaaccatttgttgaaaaagcctgttctttccccgttgaatagtcttggcacccttgccaaaaactcaactggccatataattgaaggaatataaatatatgggtttattcctggatgctaaagtattgatctgtatgtctatccttatgactgcaccacagtgtcttgatgaccttgtttcgttggaatatttttaagtcgcaaaatgtatattttgaaaattcaaaactgtgcaccatttttatattattaaattaactgtcaaatcttgtctccagttttcaagtcaggatcttactcatatctggtgatagagaaagcacatccaaacattatttttaatacacattaatagaatttgacattttttaaaaaattgttagttctttaaattttaccttttaattgcagcaatttgatttagataattaaatcttgctcatatttctggctaattcaggagaattccctggattgaccatgatgacaagaaaaagtggagaggtttatggttggaatccacatctaaatatatctgcatggcaggggttcagaaggaggcttgacttgaagtctaataaaagagtggaacgatggcttgggaactcagttgtctatcaagccctgcacccagcgaagctctgtctcctagttgatgagattgacagcagaaagacctggagtcggcttagaagaagacagcccatgattgtgtgtcttgttctgatctttttaaacttattaaaagaaaataataatgtagctaaatgcagtggcaaacaaaagacagcagtttctcactttctaactgtcagggaaacaatagatatacctcaagataatataaatattctgctgactctgctatcagagaaagcaacacacagtctaagatgataatatgtggttctaacaaaagaacatcagtagatgcaaatctagaaggctcacgttccactccgtttgttatgtcagaaatcaggaattatgcctcagttggttaaaatgattgagaggttctgaatcttagtcaacagccaagatattctccttagagcataaacacagccgttctttcatccgtttgttcgttcgttcattcattcattccgtccctctcccctcctccctttcttactgcacttgtcatggtgtcttatgtaaagtgagtgttcaatatgggagagacttatttgaggatgggaagagaactagagaggaagggggcaggaggaagggctaggcaccaaaaacagcagaacaacaggtaggattggggagctgttgaatcaggagggagagcgagggaagtcgcccatgtagcctctcttttctgaacatcttccccatttccacagcagaatgcgtgaagggacaactcggggctagatctgcatgtcgtccaggtgacactgttcacgctgcaccaaagtctccttctaataagaaattttcagaactgaatcacagcttaccttaccaaaaagtataaatgctcttttcaaataaatcacttgttttatttcaaattcagaaaacagttatttgaattttagtatcactgtagtaacacagaggtttacttggcataaactaggaaaaatatagaaagagcaagtaaattgatttgtatttgattagacacttacgtggcttttttattaaaaatttttgggtggatggggagataggaagttttctttattgaaatttttttatttaattattactgtctatagttgtgcctctacatttcagtttgctttgttcaggaaggaatataagaatataaatctcagtgtttggcataagtacactagcatttttacagtgaactgaacaagtatctttcacagtgtatatccatctgcctttttttctaactttccttctctttggctataggccaagaaagaagagagaactctcaccacaacatttcaaagggaatacattgccagaacttggaatactctactggacaaacatttcctccaaggtaaatattaccattgtaccaataaagggacacatcactagaatttttgaatggcagtggtacagcacaaaggtttaattgtttagtctcatacagacctagagtgacataagagaaagagagagagggagagagagagaagaaagcagtgctgttggggtatcctgcagcctcttctaaatgtgttaccaggagaatgccatcagaatctgggagctcactgagctgtacgaaaaatgtgtgggaaatgaggaggaaagaagaggctggccttttttcttcgtgttacagatactcgtgaacacaaaagccagcggggttcgattatgaaaataacatttcatcctttatgaggaaaaaaatgagtagtttcctttagaggttaaaataaaatatatgctgtattcatgtcacaagagggaaaagcctgaatcataatattttacaccaactgagacaagtatgaaagattttaaggaactccatgttcttctatgaaaatacctgctaagtaagcctttagtaagcctttcattggtttgtgaggaatgcttcatgaagttcttgttttggaaatcatatctttaatgcctcttgtggggaggggtgtgtgtgtgtgtgtgtgtgtgtgagagagagagagagagagaccaaagaaggatctgtcagcatgatactataggtttcagaggagtaactctaggcgctttctttgtgaatcatgagcttagtgggaataaaggcttaacagaagcagctgaattcatagtcagctttggcattcatgaattagctgccaatgttttagcacaaattgctgtgtcatttctatgaagttcccctgtcgctgctcagtctgtagctaaaagctgtcttgttttatctgatgaaacacctccttccttataaagatatttgtgtacccgcacacagaaatgcaaaaacatatgatcccccttaaaagaaaataaacttgtcaactttctctgtttagaagttaatatgatatggttgatactacctagcccttagtgttctggaaggcagtttcagattggccaggggagagtcctgttttcctcctcggtcctcatcctggttattctcttctgaagggcttggggtgagggaaatgtaggctgtacattagaggagaattttgtgatactattcattctctgttctgacagagaggacattgtttgttcactgtaataggcttggcaggaatctgtgctgtgcgtacagaatgggaaaatagcagagcagtgggaaatctcaaaattctaagcagcagatcagcttagagattttgcaaaaatctattttaatagcttctcattactgtagacgtaagtcataatttggagaaacagttttcctttcagtgataattttcttcacattgcattatgcctgtgttacatgaaaaaagtctttaagatgcagtatgcctatccaagtactgtagtaacaagaattaaaatcatgaaagtttagaaatacttgatgaacacactagacctgctttgatattgccctttgtacgtcagcattcacattggtacaaatgaaaattagcctatgtacgtcatctggtggttcacagaagcaagtgtatgctgccaaagataagagaaaaaagacgcatttaaagatgtgcattgaggtaagagatgcactgctagtgagagggagccatgctccaaatgttcagaactttaaaggcaacaactgtaaaagcaaaggctcaaagcagcatgcaaaccgtgaactggaaactgagctggctgtgactgaggcctggcatttctgcttcttgaggctatgtgttcccacttctccctgagcacagagactgcacaatatgatgggccctgatagccccaggtgtctggggaccttgtgtgtgtgcatgtgtgccaggctgctgtgttcacagacagtgtgagctagagagtgggagagcctgccccacacccagcagccccaacagcagctgtgggggaccctcgtctttaggcttaaagagaaatttctcatggctgcccaatcttggcctatattctttttttttttttttttttttttgagacggagtcctgctctgtcgcccaggctggagtgcagtggcgtgatctcagctcactgcaagctccgcctcccatgttcacgccattctcctgcctcagcctgccgagtagctgggactacaggcatccgccaccacgcccagctaattttttgtatttttaatagagacagggtttcaccatgttagccaggatggtctcgatctcctgacttcgtgatccgcctgcctcggcctcccaaagtgctgggattacaggcatgagccaccgcgcccggcctcttggcctatattcttaagaacagctccctggatatttttataaaaactacataatataaattatgagacttttaaaattctatccgtagtagtgtcagtatacagtagagcattggattattgcaaatccctttttatgtagcctgtgtaagggttaatcttatgtaacaaaagcaggtcctttactccaccacttgtgacatgattcacacgtattatctgctttgttgtttttaagtttctcagtcttttaaaatgtatttgttagacaatctttttgatgatgcatttgttcgtctttttaaaaatgtatagaaattggccagctgtggtggctcatgcctaaatttccagcattttgggaggccgaggtgggcagattgcttgagtccaggagttcgagaccagcctgggcaacatggcaaaaccctgtctccacaaaaattaaccaagcatggtggtgcatgcctgtagtcccagctacctgggaggctgaagtgggaggatctcttgatcctgggaggcagaggctgcagtgagctgagatcataccactccactccagtctgagtgacagagcaagaccctgtctcaaaaaaaaaagtatagaaatatatttatatgatgatattttgaagtacatcacaaagatagcaagaaaaaaccaccaaggcttgaataaactccctttattctttccatttggtacatttttttggtctgtttttcaagcagtttttattttattgtttttcacagctgagttaaggattactgagggacgtgaggttgaggcagggccaggttctcctgctccctccagggactccttggaggtgctgcctgcagcagcagaactggcaggtccctggaagacaccttcgtgtgcagggtaattgctggcccatctgtgactcagcagccatgcctcctatcctgcctgcttgttcctttcctgcggaatttccggtaaccactgagacctgatctttagcacacaccagtgacagctgggtctccataccctgtgaccacagttcgccagaaagctgggagagcctgcaggcagctaagttagtgtgggcaccagcctcatgtgtgtcatcatcgtggctcgggggaggatgccctaaagcaaggcgtgcaagggccttgtttcaccaatgctatgtgtcaccatctagtatgaaagaaaatgtttatcggtcgagggaaattggagtaaacacttactgacactcttttattttggggtttttttgttttgtttttctgagacagggccttgctctgttgcccaggctagagtacaacggtgctatctgcgctcactgaaacctctgcttcccaggttcaagcgattctcgtgcctcagcctcctgagtagctgggactataggtgaatgatactattttatttaacaaacactcatattgtacctacagcgaggcaagcactggtctaagcactttgcaagtattaaactttaatctgcctgatcaccctattactattattaacattcctgttttaccaaagaggaaactaaagctcagagagggtaagtgacttgccaaggaagggtagaaacagcattggcatctactccagggtctaggcattagggctccatgcgtctaaacacgggtgtctcctggaccatagcagagcttgcttaactgtcaggcccctttagggtctgtaaacacacacactgcccccacagaggtacacacaccatgttatgttgtcatttttggaactctatccccattgactgatggcatttgctgcagtggaggaagaatttgtcatccctgtccttctagaattcaaagtgggtgcggactaatccctgttacatggtaaacaggattccaggcacctcctcctgtggctgtcagggtgaactgcatcctgtgacatgcctgcagaggaacgcccgagcagcatgtagagaaaggaccagggtactgccctgcccctcctttacagcttcttcactggtgggtcctgggccctttgacataccatggccctgggcacggtggtgtagcacgacctgccagtgtggagagcagccgctctccaggatggacatttgacaattcctccctccccactgccatggggatttagacagttgctcctggaggccttgtcttaacacagaacttcccaaagtggaatctgaggagtttgatgggtgcagctctctctcatttgggcgcccccaaaagagaaaacaaacaaaggtttattcatggttggatatgtttgggagacatgggttcagcaaaattaaattgatttacttattgcaggatttctcagaattttcttgtgactctccaaagcaacatgtagaatgcagaatgtcctacattttatattttctcaggtgggtgaaaatgtctgtcaacatcatttggtcagtgttgtcttaaggagaggtaaaaaaaaaaaagaaatccaccgtcataggaggcaaacagatattgagggaaaatcaataagctacatttggggtctctaaattccagtccctttttaaactgatagctattgggaccttagagcctgaaatttctcatttgtaaaatatggaggatagaactgaattatccctaagcttttttcatccttataagctggtgactgttttgttccagaagagttttaagaataagatacaatacacaacacatcaaatgaaaaattggtgagggtaaaatgaggcacagagaatgtaaggtagaaaagatggaagaaggagggaagttattatgcaaaatacattctgtgaaatccttcatggttaatatgatagaaccaaatttggttctatgctttctaaggaacagtttgaaaagggaactatgaccacagctttgtaattaacagactcctaaactaaaaacaaacattttcctaaaagaaacaactgttcccagtttgaacaaatttttcccatggcttttaactctgtggtatggccctttagtcttttaggtagaaatttcagctctgtggtgggatggcaccaagatttggaacctcagtagatacacttcataggtcttgtggatacatacatttaatatacatcatcctcatttacggaaccattacatgttgtagcccagcccaacttgcgtatatgtggaggtgtttgggtcttgactctggactccggagtattctctccatcctggaggggccgtgtgccaggagcccgggggtgtcagccgctctccagatggcctcctttgtgcatcctcacatcagttctgggtgcacccttctccttcctgcatctctaacttagcattggccgagcctggatcggggtttccaacagccttttcacaaaatcacagcgatgcaaagctgtcccaggggttttgtgttgttcagggtggtaaaggttcaaacctaggttctattttttaagtaattattaataaataaaatgatagcttaaatacgttttagaaaataatactgcttcaggacctcttaatgtaagtgaagctattagtgccagtcagatgagtgaacatgcttatgactcacataaacactgcaagcccccatgggggctttaattagtttttataattagtcatttactgttactttatacatagaatggataactgattacagacagtaagcagaagaagcaactgatgttgtgacgattatcatttgcagtcatctggtcaaaattcttacagacttttcatggtgtagataatgttttatttcctaaactgggtgtgtatttcctaaacctgtgtttattgcattattcttttaatcttaaatatcttaatgtatttgtggagttttatattagtctattaggacatttatatggtataaaattcaatgttgataaaagaaaaagtaatgataatcatatgtaatttgaccttgatttattagaaataaatatcactcataccctctgtctttccctctctctccctttttttctctctctttctctctctctctctccttacattgttcctgataagctgacaacagagtcaaatgaaacacaaatatatatatatatactgcagagaaatgcatacaaacagcagcctaaagctttatcttgtctcattattttataattaaacacaaaaattattgcaggttgattatttttgtccaaaatgcaagattaccaaatattcatgaatgaaaacttttatctctttatctatcatgacatattaattgtagcttgaaatttatataattggtcccaaaaccaagtatatgcccatttgtcatttcaaaaatttgtcatttcaaaaatttcaaaaacaagtcatgcatttcattacatgatgaatttaaagtagactaagtagcacatcactgttaaataagaaaaaagtcaaactagaattagtaaaatttgtatttaaatgaacttgttaatgtaacctttaataataattaacttaaaatcaagtaattttacttaaggcacttcttatgtgccataaaattttaaaataattaaaatatcttccatggaggtttgcaaaagtttatgcaagtcaaaaaacatgaaatctttaaagaagccaggaaaagatattaaaataattatttgtatccaatttaaagagaaccttgctgttcttgagtagattactggtaattggataatatgaggtctggtcagttgcagaagggagattaaaggccaatggggtagtcagctgatttgaagaacatgttataaagcagttcttgctgtgctttgccctgtccacatcatagaaaaatctcctataatttcctgtcccagctctcagtgaaaatcagggatcacctcttcaaatgaatactaatcttaaatatgttaaacaaatccctatactgttttttatgttctctttttattgaagatatacatagatattcatactattttgaaatgccaattataaattagtacaattttcccaataatatatgggcattattgtgaaatgaaataccttttacctttaatatatggatttatggacactattgtgcccatatattatttagaaaaaatatagtaagtaaattttacatctactattacatccaaatgtggctaacaattcagaatgacttagataagcatcgttattttccagcaatattgacattgcttggctgttccaattgttaattttaaaacccaactgttatcagactaactatgatttaataaaactttggtaaatgtctaaaggagcctttcagtaaatatgatctaaggaaaaagaaatatacagaaatgaaataacttttacatttgattaattgaagtaagttgcaacatttttctgaattgcagttagctttcattttcagactttggaagaacaagtcatttgtaccaggaagtacatggtaaagaactatgtttggcaacttagagaacatttttagcatttgaatttccctatttatagtacagcatcaggcatagtaaaatgtttggcatttctataagggatgcaaatgccttaacattcactgttgtgatctaacaattcatttcagagtaagatgaatcagtcttgtttggaaaatgttttacacaaatactggcaaggaaactatcactgcatttctgtggattttaaaatgcagactcctctaaagtaaatggtgacaaattgcacaatgttttttctttcttctgcgttaccatgcttctatgtgaactgacttttattactttaaattctcacactactctactacattccttgctttttagattttgttaatccatgctggaatcagaaactctgtttccaggtccttctaaatgtcgaattctttttaacctaaccttcctttaatccacaatgttttcctcataattgaaaccacagattacttcattaacatctgcccttttcttttacattagagaacgtgagaattgtaatttgtaggattttgcccttaatttgctacatagaaaagaaatacttgtattctccctctttctctctctctatcacacacacacacaaacacagaggcacacacacacacacacacacatgcacacacacacacacttgaagtaatgaaaaatgagcagactaaatgtaatgcagcatcctagatgggatcctggaaccaaaaataaaaggacatagggtgcaaactaaggaaatccaaataataataataatgtaccgatattggtccattaattgtaacacatgtaccatgctgacgtaagttgttaataatagactagaaaaaatacagcaaattcatttataactaacgtattaaaaaccatagttgacttcagcctgttttgtgataagaagaattgaagtatacaaagtgataatgatatctcctgttgtcaatgtcttctactgaacatagtcatctatagcaaaggctggcaaaatccaagtatttggcaaaagctggagaccaaatccagccctgccatctgtttctgtagggcttgaacacacttctgctgttatcttccagatgcccctagcggggcaagaggatgcaggctcagatgatctgggctccattcccagccatttggtgttgtgggcattgtttgacttatttaacctttctggatgtcatttttcgtatctgtgaagtcagagggtcgaaccaggtttttcagaacctgtggcgtggagaattctgactctgaatgtgtgttggaggtccatttgtgattacagcatagagtttattaaggatgaaattttggcattaaagcaatttgcatgcattatatatgcaatatatagcttaaaacataagattacccatcattttcggcacttttgaactctaccaaaaaggaattaaataatcacaaaaaggaaccctattgccacgtgtattagtctgttctcatgctgctaataaagacatacacaagactgggtaatttataaaggaaagaggtttaatggaatcacagttccacatggctgggaggcctcataatcatggtagaaggcaaagaagaagcaaaggcacgtcttacatggcggcaggcaagagagagcttgtgcaggggaactcccatttataaaaccatcagatctcacgagacccattcaccattatgagaacaacatgggaaagtcccgcccccatgattcaatctcttcccaccaggtccacaacatgtaggaatcatgggagctacaatttaagatgagatttgggtggggacatagccaaaccatatcattctacccctggcccctcccaaatctcatgtcctcacatttcaaaaccaatcatgccttcctaacaatcccccaaagtcttaactcatttcagcatcacctcaaaagtccacagtcctaagtatcatctgagacaaggcaaatcccttccatctatgagcctgtaaaatcaaaaacaagttagttatttcccagatataatgggggtacaggcattgggtaaatacatccattccagatgggagaaattggccaaaacaaaggggttacagggcccatgcaagtccaaaattcaatagggcagtcattaaaccttaaaatgacctttgactccatgtctcacatccagggcatgctgatataagaggtgggctcccatggccttgggcggctccacccctatggcttttcagggtacatccccactcctggctgctttcacaggctggtgttgagtgtctgtgactttttcaggtgcacagggcaagctgtcagtggatctaccattccagggtctggaggacagtggccctcttctcatggctgtactaggcagtgccccagtgggaactctgtgtaggggtatcaactccacattttctttccacactgctctagcagaggttgtccatcagcttgccactcctgcagcaaacttctgcctagacatccaggcatttctgtacatcctctgaaatctaggtggagattcccaaacttcaattcttgacttttgtacacccataggcccaacaccatgtgtaagccaccaatgcttggggcttgcaccctctgaagcaagggcctgagctgtatgttggccccttttagccatggctggaactgaagcggctgggatgcagggcgccatgtcccggggctgcacagaacaggggggccctggcccactaaaccatttttccttctaggcctccaggcctgtgatgggaggggctgctgtgaaggtctctgacatgccctggagacattttcaccattgtcttggtgattaacatttggttcctcattacttaggcaaatttctgcagctggcttgaatttctcccagaaaatgggtttttctttttaattgcatcatcaggctgcaaattttccaaacttttattctctgcttcctcttgaatgctttgctgcttagaaatttcttcaaccagatatcctaaatcatttgtctcaaattcaaagttccacagacctctagggcaagggcacaatgctgccagtctctttgcatagcaagagtgatctttactccagttcccaacaagtttgccatttccatctgagaccactttagcagggactttattgtccatatcactatcagcatttttatcaaagccattcaataagtgtctaggaagttccaaactttgccacattttcttatcttcttctgagccctccaaactattccgacctctgcctgttacccagttccaaagtcagttccacattttcaggtatctttatagcagcaccccactcctggtcccaatttactgtattagtctgttctcacactgctaataaagacatgcaccagactgggtaatttataagggaaagaggtttaatggaatcacagttacccatggcttgggaggcctcacaatcatggtgtaaggcaaagaagaagcaaaggcctgtctcacatggcagcaggcaagagagcatgtgccaggggaactcccatttataaaaacatcagatctcatgagacccattcaccatcatgagaacagcatgggaaagacctgcccctatgattcaatcacctcccattgggtccctcccacaacatgtgggaataatgggaactacaattcaagatgagatttaggtggggacacagccaaaccatattgccatgtgagtcacttatgtactaggaaagcaagaccagttgttttgaaatacccatgttgaatctgagctcaaaatcatattaaaatattaaattgtgccttaatttgtgataaagtattactatccaaatgataatgtacactttgagaaagaaagattttaggctaatgtactttaagattgtacacttaaatgcaatttagcttgaatttgttattcaatatagtcaataatgttatgtggtatttaatttaggccaataaagttttgaatacctaattatgttaaggcctttaagacagttgagaccttgccaaatgttcatattatgcttgtcgagttaattatcaggaagttacttatctgatcattgtttcttaatttctattgagccagtcattgtcctttataagaaattattttccagctgtagtatttcagtgctgggttttgattatagacatataaaaagggtttatttaggactgcctttaaaattaaatctgatcataattatttgactagtagaggcactctaggaaaaggttgagtagtggctgtccactttggctactcagtaaaattacccaaggggctgtttaaattcccatgtgcaggtataccctcaaactaattaagtctatctctggaggtatttttttaaagctcccaaggtcctttgaatatgcagccaaagttgagaaatacaggccttgagaacaagcaaggaaagcctcctggggaggtctttctgtagtggaatgctcctgctctttgtaattgggtagcttgagtagctgtgaagttctttaaagaagattattttcaaaaagaaagaaacttaccaatatctggagaggggcagaaagcacgtgttgcttgccctaagtctccatcctacaaataccaggagagtttgtcctgattttgaaaggatttaggaggtaacatcctgcttttgtcaacgcatggtgtttgctttgacttttgtttggcatcttatttcacctacaagatcagtgggagctaaaatttattgagcgcacctgctaagtatcaggtcctgtgctataaacatcactctgtctcacagccaggaaagatagaattattcacttagaaataaaaagtcagagttctgttttgttagagaaatcttagtgtaattgcataaatatttagtgatttctttattcatctggtgacctttgttgaatacatatgctattccaaaaataagtttaaacatgcccaaagaatacaaaggatctgtattcattatctgttgcttcataacaaccttagtggctttagatgaacatgtatttagctcttgattctgtgattgatagtttaggctgggctcagctgggcaatcctctcgtcttggccaggttcactcatgcaacaatggtcagctgtggttcagctttgctgatcttggtggggctctctcacttttctgggagctttaactgagacaagctggctgaccaagctctgttcctttggcctctcagtcatcagcagggtcaacctagatttgttggaatatggagttagggtttcctagagaatgcctaagtatccacggcaccttaggcctggtgtgagaatgggcacaccatcacttctgccacatttcctggccaaagcaagtcacaagcccagtctagacacaaggagtggggaaagagatttcatttcttgatggaaggtactaaaaagtcacattttaaagggcaaggagaaaggaaacagtgagcaattaatggttattttttgcaatcaaccacaggtagaaaacttcagttctatcttgggacattagagggtgttcctgagaaatggtaacatttgagcaggtttcaagggtagaaaatatatttcaggtgaggcaatagcataaggagaactgtcaaattgtgctttcattagtgaaaaacaaaatggaggtagtaagttccctaaacgtagaaaatatgtctagccgacaactgagcatgtggaaggcactcagcatgtactttctcatttacatcaaagggcagtgaagtgactaagagtgtaggcccttaaagcaggtataataacctgatagccttaccatttaccagctagtttgccttgaacaaattactgtgcctctttagtaccatgaggacaataatacctcctatagcatttgctgcataacaaaccactccatgacttaacggcttaaaaacaacagccatttactcagcagctcattctacagttttatagtttgggccatcttaggttggaggttcttctggtctcagttgggctcatgcctgtgtctttggtcagcttgcagtcagctagatgtctctgcttctgaggattggctggctactgggggaacaataaggacaactggatgaccaccttctcatcatccagcaggctagtgtgggcttattcacatagaggatcagcagaattccagagtgagagtagaatcattcaaagcatgtgggctgggttcaacattgacacaccattgcttccaatgagctccatgagctaaagggagtcacaaatcagcccaccattaagagtagagaaacagacagcatttcttgctggaaggagctccaaagtcacgttgcaagaagtgaggatacagggaggggaagacttgtgaccatctagggaatcttctatacctacctatagctcacaacaatcctgtgaagaaaaagttaaatataacttgatttttctaggtgaggctccaacctaaaaagtaccaggctaatcatagatgttcaatacatggaaagtattaactttttcctatgaaaattagaaatcagattttaagccaaattctttaattgcttacttttatagaatatcagatgaacctccaagtgcttcttacaaaggttaaacattatacattctttccctgttgcagaaatataatgtaagtgggtaaagctcactgcctctgagtgcatgtgtatcttggcctgacagtctggcagctgcaatgtgtagaatatgcttattcaacataaagggtcaactcaggaaaagaaccagagacggtcaagtacaatgtttcagttcccaaaatattcaaggccttttataatgggtaagaactcatttcaaaacctatacaaagaacaaaaaccttaataaattgttattgatttcttttactgttatgagtattttcataaaaccagctaagcctcatatagttctagattgatccacacattgcttttggatcccataaattgcattcaatggagatttatttatctggcagctaaaatacctctaatcagtgatgtgaactggatcaaaaaatacctatactctttgaaataaatagaacatcaaagggtattcaagaatgtgtagtgcagaaatatggcaaatgtgcattgagggtggtgccagcttttttataattatggaacttctaagtccttaaatgatagagatcagatggttcttgcgctctgcctcctgacttcagcctgctttacccaacccaccacctccaaaagctccaaagcccacaaaagggccctctatccgcccgattgcacctcattcccaaacactgaatgtccactgtactgcttgttcctcttaagattttagaaagtcttagtggtggagtgattaagaactgtggctctgatcctcatgtctctcactttcttcctctctgagtgacaggggaagcttctgaagctacaagcctccttccttatttccttaataatggtcgtacaaagacatgtttacgtggccattccatcacatttagagtcatttgctgttaacaacaacagaaatattgaatccccaacgatttatgtcattagaaaagaaaaacaaatataaattaattaacattttcaagacatcccaacacaggtttgctgatggtgttgctttggctttcaaagcctgctagtccccatcttgctctgcagcactggagtatgggtcactttctggaaaggcttcagtgcctttgctacagagtaaatagtttgttttgaactctcagtttgtttttaaagtaatgttttatgggccatgtaatgaagtacctaacatagtgctaagcacatagtaataagtatttgtagacctgatatgtctatctttgcatgcctgagaatgatttccggtttataaaatttgtgttggcaaggaaagcagtttttgttgctactgataagccatctggggcttgatattctaaatttgatgactctatttacacataatatcttttagggggattccatattttttacgtttgtttgccaaactagaagttatgtacaaagttgtaagcccaaaatctgagaattttaccctggcaaaccctacaaatattttaaattaccgcaatgattttttagtaaataaaatgtcaatgcaaatatgtggaactagatttcagagatctcagagatccctgaacattctatggttctttatactggcactgtagagaatttatattatattgaacattttatattaagcatatgtcttgaggccaggtgcagtggctcacgcctgtaatcccagaactttgggaggctgaggcgggcgaatcacttgaggtcaggagtttgagaccagcctggccaacatggtgaaaccctgtctctacaaaaaatacaaaaattagccaggcatggtggcagacacctataatcccagctactccagaggctgaggcaggagaatcgcttgagcccggaaggcagagcctgcagtgagccgagatcacgccactgcactccagcctgggtgacaaagcaagactctgtctcaaaaacaaagggcaaggggaacttgatgttgagttggatatgggaggaaacagagagggtggtaaacagggaggacctgggatttgaccttggccaactagctgaaggtggcaccatttccagagagaggggccctggaggatgaccccaggggcagggtacaatggagagtatagccttgcgcacactgaggccgagggcctgggggacacccaggcagagaagcccaggtgcagctggatatgggatggcagctctgaaaagaggcttgggccagagatacagatctgggatcatggcaacctgatgggaaatgaaggcatggttttggatgatgtgtccaggaagataatatgcagcaaaatcaggaaaagaacccaagaccataccttaaacaactatggtatttcatagctagggagaggagccaatatcctggggtgttttctcaaatgtgtggttaccataatttggcatcatcctttgacccatacctctgccttttaagttggcatatggatgataatgattctggatagttatacagtgtctgaaatttggtctgatattttctcacagaaacttatacacaaacctctgtcttgtggatgtgagttgacggacatgggtaggcaaaattcttgcttgctatttgatgatttaagtgacagaagtgaaaaaaaattttttaaattctggtatgtagacttagaggcttgatcaatgcgagtttgcattatcgttagactttctagctagtgcccagggtttccttttgcatcacacaatacaatgtctggttgtgcctcttttcctgacattaaaattcatcagtggattcagaagaacctgcttattttaaaaactcaatgtatatataatatattcaaatggacagctggtatctgattatttctttattttagttacagctgtgttaaattcaattataaattataaatcataatagaagaatcagctgctttgaatgcaggaagatgcagattcttctttaagtatgtttttgaataaaataagattatgttaaaccagccagggaagcagcaaaaggagttaatatttactgggtgcctactctgggcaagggcactgaactgtgcatgttgcacaagatacaaatgtagctgattttggtaggggtttcaaatatacttttctatgctgaatggcaatctgaaatactgaagatactgaatggagctgacatgcaaacataggcacatgtttggaaggctggcagagtgtgttatcaatatggcttaaagtgctagtctagaccaaacagaagtgcctcaaaatagtggtagtgcccaactgtcattccatatgtcagtaggatttgtcctgaagatattgcagctgacttcttggccagtactctcagtatcatgtggtaataatggaaggataagattactaacaaaagatcccaggctataatgagtccactaacattaaatggatgctttctgcaatgtacctcccatctcaagctgacatgtatggaaatgaacaattgcaagagacccaaaaactttaccatggcagactgaggaccctatgccaaataaacatggtgttactcccgataaagtgatctaaagaaacctcaacagacgattggaagtacagtttcagacattaatgtctagctgccttctgctggaaattgaaaggaacaactaagattgcaaaatgtgcaaatggagaagccctctctaccagaagcttggagccagccagaggtcagcaaagcacaggctgcaaaacgccttctctgcaaaagtagctggcactgtgaatctaattaaaatcccaacatgtgcatattgcatgagggactatagcttaaaatgaaattgcaactgtacacattcattatctattagccatcagtagttacaaccttaaagaatacaggattgtatttggtactattcttagtaagactgcaaagatatgcatttattcactccatcaatatttactaagcacctgctctgctgtaagtgcatgtattagtccgttttcatgctgctgataaagacatacctgagactggtcacttataaaaaaaaaagtttaatggactcacagttccatgtggctggagagtcctcacgatcatggaggaaggtgaaaggtatgtcttacatggcggcaggcaagagaaaatgagaaccaaacaaaaggagttccccttataaaaccatcagatcttgtgagacttactcactaccatgagaacagtatgggggaaaccactcccatgattcagttatctcccgccaggtctctcccgtaacatgtggcaataatgggagctacaattcaagatgacatttgggtggggacacagccaaaccatatcagtgccttagttatagctgcaaagacaaacatagagtttgtgctcatgaaggttctattctagaggttgtacatacaacaataaacacaaaggccaataaataatatgctttcagataaggataacaggaaaagacagcagggtaatgagatgaaggctgagtgtagtggagtggacgggagagtttcagaatggttggtcatagaatgcttttctgagaacacgatctttaagcaagactgaaaaaataaggaggaaccagctgtatgatgacctgaaggatgttcattccagaaaacaaacagctagtataaaagctccaggtgaggggaagcttgacatggtcaagggctagaaagaaaaagcacatgagaagtcatggtcaaggagaccaaggaaccagctgaggctggaatggttgggtccacctgccccatgagaacccttcaatgaatgttggtcaaactgagctgaacaaagtgtactgtgtccgtttaaacaatgaaggtcaatagaaaagctaaaatagcctaaatcataaagaaaagttattgtcataataatgtgttgatttattgtacattctttctaagaattatggatcattttgcaagtggatagagaaatgtattttggatcagctttgacatacgcttaaaaacagtggtatgttaccctcaaacaagtaacaggccaagagattttatatatttcttgttgaaatttttatatttgaaaatgcttaaaaataatgctattttaatttctataataaattacaatagccatataacttttgagggatgcagagaaaactacatagaaataatgtagcaaacaagcaaaaaaaagtgtggctcaaaatccctatcttctaaatctgagtctttatgttgtgtgagctcagataccaccctctggaatagattcaaaacatgatctgttttggcctgggctttaaggatatacatgtgagaaactttggtttatgtgaattgcagcatagactcgttatgtgggaagaggaacaatgagctgtatctgttttatattgccacatcctgattatgacatgttccaatactacaagagaaataagatggaatagcatctgctagttaagagtttagaaatatgaatgaatagtctagctcagtgattctcagccccaaacatatattcagataccctggggacaccttcacaaatatcaatgtcaaggccccattcctgatctattaagccaactttgagagttagacctcggcattagtgtattgtaaaaagtttggcctgggcacagtggctcacacctgtgatcccagcactttcggaggccaaggtaggaggatcacttgaggccaggagttcaagcccagcctgggcaacatagctaaattccatctcaacaatacataaataaaaattaaccagatgtggtggtacatgcctgtagtcctagttacttaagaggcctaggtgggaggatctcttgagcccaggagttcaaggtttcagtgagctatgatcacaccactgtactccagcaagggtgacagagaccttgtcttaaaaaaaaagttggcaatggatagccagggttgaaaaccactggtctaatttaataggtcgccatagtctttaggataccgttggtttgattttcagcatcttagtctctatatctcatatcttatcatctgggtaatacttcattattttttttagagatcagagcttatggtccctaaggttagtttgatgggaaagtcttttcctttctgacttcctttttccttttattctttgctcttttgaaaatgtattttccttctaaagcataatctggagattgagaacttttaaaatctataaaggaatagtccatggtaattaaacttcaagtttcatgtatccattattcagaaattaatatctgcttctaaaaatattgaagttgttataataaagacacataaggttttttaaaacatatgaaataaaaaacttgtaattggcattggtgtaggcagaggaaagaaagagctagacgaagataattgctataattaaagataattacagctttgagcatccagccagccatgtgaggggaaaagaagaaaggaaatatgatttttgtatgtgtagtttatcttttatacaaaaaggcaaactacttcaccaggacagaaaaccttcttctgagaagtaaaatctctaggagtttatcacacagacacataaagctttatgtaccacacagtagaacaatgtcatttaatagttttatgagaaattcagataaatcaagataatttcttatattaatattttataaaagctacttttatgacattacttcatcagtaggttcagctgctacctcatagagtcctgagctcatgtcagtaggactgtgccagctgcagtcctggaggatgttggtattccagtgagctgtggcagagcatgtccttcagttcatctgaaagccatacgaagtcacagatgagaggaagtggagcagaacaccactctgttaggaaacgtgagattggaatttgatctgtcaggttcaccttacccttttaaattcttacagtagtagtattatatatactactatattatatatattatatattagtatataatatgtagtattatatatattatatgtagtattatactttgggagagtattaatagtttgagaactatactgtagtcatacatcttggtgtcttagatggatcctggctacagaatcaaaaacgtatgatagataagtggctactgcagaacaccttacattgttcttaattatgttcttcgtaaagggaagcagagtgttaccagtgactactagtgagccagttgcccctaaagtttgtttattcctgaaacactataacatggcaatttattaagtataatgaagtagaattttgaagagtttggagaaaggtctaaaatatgtgatgtgaaaaagactgaattattcttgtttatgggataatagcatattgttttacaatttgtgtctagaaatcacgtaactgttagaaataattgcttacaaaaagaactagaatgaaaccacatagcttatattatttaatccgatggacaaaatgatacatactaacttcttttcccaatagcaattactagatgtcagtggctaccttgattttcctagatgagttttctttttgtcctaaaaacacatcttcttgtcctgttttgtaaatatatttttcttgaagttttcctgtaatagatgcatgagaaataagcacacagtgattcccccggaccagattccactgttatatttctcacagtaagcattggcagggccactgccacggctatttagtgcaaacctcatgcctctaggaggtgccactcacagaaatatagtctatgctcttagtacagccagacctcctcaaagcctcagtggcagagaagtgtgaactcacattcctgactccatgtgtcattcttcaagctcccgtgttttattttttaagttcttttttttttttttttttttttttgagacagagtcttgctctgtcacccaggctgggatgcagtggcacgatctcagctcactgcaacctccaccttctggcttcaaacaattctcctgccccagcctcctgaatagctgggattacacgtgcccgccaccacacccgtctactattttttttttttttttttgtatttttgtatttttagtagagacggggtttcaccgtgttggccaggctggtctcgaacccctgacctcaggtaatccacacacctcagcctcccaaagtgctgggattataggcgtgagccaccatgcctggcctattttttaagttcttaatagaaccttgtactccatgagatccatgtttcttttatgataaattaacttaaaatcaaataacttccacatttctagaagatgttgttggcacctttttcccgcacttcccacaacatgtctctaatatatgcctgtccctacctgcaaaccttgccgctgtatcataggctactctctctctctctgcctctctgttgaatgcctttaaaataccctttccagaaaaagagtgaaaacgtagcatagagaagtgaagggggcagggctgtcagagccatactgtgatatttgttctcattgtacaacctgaagactttccttggtctctactttccaaagaaaatggaaattgggggtagagtgaccatgttgactgccttacatacaaagggctttgaactcagcacagggaaaggctctctttaaaatgttagcttaatgaatccatattctaaggcctctccaaaaaagttcttaatactgtggcatacaatgtgagttccacatatgatccttcaacttgaaaacctctgtgacactcaaaatgtaaaactcttcacattatactccaagacttttcataaacacagccttaacccataacttccattttattcatgatttccaaatagaaaaaaaaaatggaaaatctcgaggaagacagtgtgattttaaagatgttcagaattgcattctttttggtgcatgaggtcttgtaatcccattggctccatggctttctaaggagggtcagttttctgagttctccctgtggacttctggagtttcactgcctctgcccctggggacccgctatgagattagatttttactttcacactatgaaccaggaacacagtgaggcttgtctacagaaccagtgagatggaaagggaccaggaagaggtggcacttcagtgcccacacagagagagaagggatagagaacagattcaggattgggcagtgcaggactcacaagcacgagacctgtgtccttcaaagggttttctagtgaattacctacttgggaatcacttaggatgcaagataaaaatatagattcttggccaggcatggtggctcatgcctgtaatcccagcactttgggaggctgaggcaggcagatcacttgaggtcaggagtttgagaccagcctggccaacatgatgaaaccccatctgtactaaagatacaaatattagccaggcatggtggcacatgcctgtagtcccaggtacttgggaggctaaggtgggagaattgcttgaacctgggtggcagaggttgctgtgagtcgagatcgcgccactgcactccagcctgggcgacagagcaagactccgtctcaaaaaataattaaaatttaaatttaaaaattaaaatatagattcttgggcccctctccaactctattatatctgggcctcagccctttaacaaattgccccatgtgttacaaggcaggactgggagaacgtcagggagtgagggattctggagggcatctttgcctgggaaggacggcaagtgaagcctatgaggctgacagatggaggggcaggtgtgctgaacggacctgcaggacacgcgctctgatacagatggaggctgggtattccatagggccacaatcacacttatcacttcagttgacagaacacgcacttgctcagaaatgttctgtcccattgttgtgtctctactagagaccctccagttttctccatattgccttttgtatcgggtccaaggtctttttggctctccaaggtattagcagcctttgaaatgaacaagaacctcttccaaagagcatgactgattctgatcactgagttccacattcagccatgtcagactgaaagaacaagatctgcacgagtgttactattctgttgtactgatttcccccacctgtgttgacttaattttaacttccctaaattggagaatggaggagagggagatcaatgtattggagtatataaatacatacatacatacatacatatatatgccattctctcagaattccccctggattaaggccagccacaggcaaagaggtgaagcagaaaacaattacctggaaagccccctaagtctattcccccatgtcctgtctctctcagatgcacaaggcccctgcgtcctggcctcagccctctcatccttctccttcccctcttttcctcaccaggtgacttggtctgttgccagtcatttatgttctgtgtgattttgaatgcatgtgtcacctcttgcatgaatattttctgttttaagctttcactttaactgtaaagtgaaatcagttttcttccattcagaaagtgggggaggtaggctctatacagcaccttcctggtccctgggatccagcccatcctcagaggccggctggccctggctgtggtcaagtgcatgcgtgggagggagtcctttccaccgtgtgaacatgcaaaggctgtctttggaatccaccagacacattggggacagttctcagcttgaaacaacatcagtccaagggcattgcagctgcatcaatgccatggagcctctgctgccaggctaaacagaatcaagcagcaattattgtgattaaatgttgtttctagtgcaacatggtagaagtgaaagaacttgtggcttttttgttctgattgcacaagcttggagttcaacaataaatggcttttcatttgtggtcaaaatacagctctgtattaggaacttaatcctaaacaggtttttacctcttgcaaagtttatagtggtccaatattgtttcatattcatggtgtgattagaagatgaaattgtgcctggcacatagtaggtatttatcaattatgtgtttaatgaatgacagagtgtcagcaagtagaaaatatcatgcgaggtattggtcaagaaaccagtgaaaccaacccgagttgcagactgcctgtagtaagagaaacagagaagctttccagaatctcttatcacatatggaacctcctcaagcttatcaagtcctgagattagaaattaaatggatccatttccaacttgctttttgtgtaagattttcaatattttgggtatatgcctttaatcagcctcggaagctttcaggagaagtgttttctttctgcgttacctgtccgtgcaccatctgtgtgttttggttctgtcttcgcattttgttgaaaggctactctaaatttgaattgtaaatatgtaaatatgccaagtacatgttaatgaaaaaataacgagacttgtaagtcagccctgcagccggtgtaccatggtgatgttgccagagtgcaaatggtgttttggaagggctgtcgggagtgattcccggcactgcatgctgactaaaaaggccgtccatggcttctcttcctgacatccacctaactgctgtggcctcatcaggtttgcctctgaattactaagactgtgctttctgggagttgaaactattgatcacattaagaatttaagattcttgctggagcaacattctcctttgtgtggaaagtcctgaatttttatcttagactttaggaatcactggcaacttataaaatgatagaaactaagggttcaaaagaacccttagcttcttttgaaatgaccacatttttcagaaggggaaactgaggcatggggcggcttggactcgcttcaggccacacagcaattcagtggaaaagaatggagcagaacctggtctgtacttctacgtagcagcaatgtacccgatcactgccattttaccagactctggagtgggaaagagctgccttatattcaagttcctttaagggaatcaagaaggctcctaggaaacaaaagctctgactttatcatcccataatctttgagtaaactgaaggctaggttccagctccagggatccggctgtataaccttcagcatctgtactagtgctacttcaaatgtagttcacagactggcagcctggatgtcacctggaagccagttagaaatgcagactcttgagccccgctccagacttgccaaatcagaatctgtaacaagatcccagatcaccatatatacatctagcagctcttctagaacagtgcttctcaaacttcagagtgcgtcacgatcacctgcagggcttgttaatacagaggttgccgggccccgccacccccgagtgtctgagtcataagtctgggggaaggttcagaattctgcatttcaacaagttcccaggtgctgctaactgggaccacccttggggaagttccattctacaagaaccatgaccctgtcccttcctctacaaggggcctaggagtcacaccccttgagtcatctgccttccctgccctctccaggcagaaagctgtgaggataagctctggacatatatttttaaatacaagttctgactttctctaatcaagctagtctctcttgaaacatttccccagccctaagtaattcacaataacaccagtaaataacttggagggatgtgtgttttgaggattttggttctatttttatgaatcaagaaatattttgcctggctattaatatttttaaaacttcataaagatagccattatttaagtactgcgtaatgatttcagccacatttttgccattgctgggtacaatattagcactgttaagccagcagtccttacgatggcagtacatctaatggtgtgggagagaccacaggacgcgttctctaatttggcactagctcacagtgaactggtgttacaaactcctctgttgacattcctttgacatatgaaatgaccatctgctcttaaattctacttctccagtcttgagggtttacttttcccagatcaagcatcttttactgtgcagtcccagtgaggtagtagctgtctgccgaaagggggcatttgtagttagcccaggctaaacaagtgctaaaaggaagtggatcttttcaatatcatgagccacgagtaggaaatttgattgagaggcatttgtgtcaagtggtacatttttgaacctcttggcaaagaaactgaagtttatttttttttaagtcttttattatgaaaaaaaaaaaggtggctgaattactgccctcagaagccaaataaaaacagtgcaaagcaatgcttaacagagcgtgactgcaaatagtgctggtctcagtaaactggcctgcctgtagacaccacatccatcacagcaaagctggtgggatgtttgtaaagccctccagataccttggaaggaggtttatgattaatgcatggctgggagtaagcagtgggtgtaccagatgggagtgaacattcttctctctggccctaaaacaagtcctgatagagtgaagttaagattgccagggagatgggtgtggctctcacatcctcacctgtctgctgctgtcccagacaggccagacgcctggaggttgtgaatacctggggctgagagcatgctgggcagtgtgttagaagaggaagtgctggggacagagcctgtagctgcatgaccctaaataaggcactgaactttgagcctcagtttcctcatccatagaatcgattcaataacatctaccgcaaagggtcatgaggacgaaataaaataacccacagtaaagtagctggcagacacacagtctgtgctcacttccatttttcggtgctttttatgtcaagcctatgagtcaaaactggtatgtagcgagcctcttgggggccctggagggaacttgggtaaagccacagtaatggattatatgcaagcaggagcaccatggagaccaacctaccctggccaggtggtcgggcaagcaggcttttgtaggttccttgtgcccccatcaagtttcagcatcacttgagaggacagagcaaaagggtttcttccaactcttaccacctttgaagatctgaccaatatgcacttcctcttgcctccttttcttcctcttaactattaattcatccaataaatattaagtgcctactgggtgccacacactacggctacagttatgaaccagataggtcagtttgaagttcctccctcctggggcttagcccagcagaggagacacttgaattgcttcataatttcaattttgagtaaggaaggaaaaaacttgtaaaagatgggcctcagccacacctgagaggtgggagggttttggcatcaggaaagctgccccaaggaagtgagactcataggatgcttagatttgtcagatgaaaaatgttggaaagagagccaacaatgtttaaggctcctttttcctttagaaatggaaggtccagcccccttgaggcttgtgtgaggaacctaggagctggagaaggtgtgaaattgtcattgcagagaggggtcagaagaacactaagcttggggacatggtgagattactggagttgacaggcctgctgcgggggatgaagacactgatattacggtgctgtgacttttctcaggagatgttcagctgcttcagtgacaatacagagaagccagatggctgtgttcattccagagtgaaggatttgccttaaggccaggtgcggtggctcatgcctataatcccagcattttgggaggcctaggctggcagatcacttgagatcaggagttcaagaccagcctggccaacgtggtgaaaccccatctctactaaaattacaaaaaaattaccaggcgtggtggcacatacctgtagtcccagctactcaggaggctgaggcagggaatcacttaaacccaggagtccttacaatcgattcagtaacatctaccttaaagggtcatgagccgagatcacgccactgcactccagcctgggcgacagaggaagatgctgtctcaaaaaaaaaggatttgccttaagacactcttagcttattttttaattgtttgcttagtgcgctcatccctattactctccttcccttccttgtggtataaattatgaattaaacttgcattttgagaatctgcttgagaatctactcaccattcttcctacagaaacatgtattcaataaaaattcctgactggctcctatttcccaggtcatagaggtgctaggaatatggtgggaagtgaggtggagacatccctgccctcaaggaaattagattggatgagccaacatgcaaggcaggaagaaatagaacctaaagcccaaaatacacactgtctgaaacattccatgaagccttcttgtgcaaagtgaatccccactacccgtgctccttatgcagtcagtgtagaacgtaccgcattagcccaaatagaagcgcatctcagggttctgtcagagtgcatgtgatacgtacttctagaaagaccatgcccttgcactctgcctccctccctctctcgtgtctctctctgtctctctctcttcaccattaaaaatgaaccttgagaattggcttccaagtcagaatttgggggaaaccaaccttagaagtgattccttacccatcaaattcacttgccttttggcttgtctggggcaaaagtgtttataaacaataaactatattatttctgtgatgtaagtttaatgtattattgaagacaagtgacagccccacatacccctccaccaaaagggtcagctttcctgttttctgtgcagatcgataggtttggtgtgtacaaaaagtgaccaggttatgctgacagacagccatgaggatttataacttgcttttaggatgagtgccggtctctctcccatgagcagtgagtcctgatagcagggtcactgtggtctggtgatgttaaggcattccaggtttctttcatctacactcattcttaaactgctgcagaaagagatgtcaagatatcactgggtggggacattagaaaaggattcaggaatctataaacaagaaaagcttaccttccaccaccctctgtgctttgggtgtgttctgcccctgactcagtgcaggatcagaatagggcgatcttgataacaatcatgtgtaggcaaaagcctttgtaccttagcaggatggaatagtaaatatctgggtaggtgattccccatgtgtttccaacagacactcatccgtgcagagttcagtgtggcaggcttttctgtagcacagtccctgtaacctgaacggaagactacctgaatttgcacactttagcttaaaactctttctggggcttgaggattctgttcagagtttatttcatcttagcctgtgcagctgtcagtgtgctcacaggaccagggaacccaccaaagaatctgcttcctccgccatcattaaatctggttaatttagagcccacaaagtgtcattttaccacatggttcccacgcctggtaatgaccaggaaggaagaattcccactgggattgggcccttgaccatatttcatccaacagtgaggggtcatgagtggaggtggtttctatcatgtttaattatgtgtcaactgcaacagctgtaaaaaggtaatgactatcattactgacctagacctgcttcaaaagaactctaaagtgtctgtttccatatctaatctcactggccatcccatctctaccaaattattatttatagaatttgctatgatcagagaacctacctgttaaggatgtttggccaaagaaataaatagctgccatttggtctgcacctttcattaatttgtgtggttttttttttctcctgttggaattgattttggtggctgatagtgcaggctaatgaagacaattcaaatgccaagcataaggcaccaacaataattgagcagctttccttaaagaaagtgctgcatagggctgagaacagaattatgctgccaccttgtggttaaaagtgacacctgctggccggtcatggtggttcacgcctgtaatcccagcactttgggaggccgaggcaggtggatcaccaagtcaagaggtggagaccatcctggccaacatggtgaaaccccgtctctactaaaaatacaaaaattagctgggcatggtggcgcgcgcctgaagtcccagctactcaggaggccgaggcaggagaattgcttgaacccaggaagcgaaggttgcagtgagctgagatagcaccactgcactccagcctagcgacagagcgagactttgtctcaaaaaaaaaaaaaaaaaaaaggacacctgctgttaaatttaaaggccagtggtttttctagtgattaaatcacttatgcattaaaacaaattagtggatataaaagggtaagagagtatggaccttttagtccaaaataattaatgagataaatctttgaaagaatccccaatgaaagtcctttaaccataagcactgacctttctcaaggctaaacaacaagttctcacagtagttcgaaattatacaaaattggggtggagattgaggtagtaccactgagtcttttacagcaatactatatgcttgtattatattacagtctccagccatgactttacatcaatgcagccaataatgaagcctattttatagcaaacagaattaatgtacaactattaatctaaatctgtgatcacattaatattaccatcttctgtggctcatcttagtacagcattcaggtgccaaaattaagtgttagtagagttaacaattaaaataaatggtccttctttgccctgtgttgaataactcaaagaatatttacacatgtggtctgataagagaaattttttaaactttgaagaaataggctgggtgtggtggctcatgcctgtaactccagcactttgggaggccgaggtgggaggagttcaataccggcctggcaacatagcaagacctcatctctactgaaaatcaaaaaagttatcctggtatggtggcgcatgcctgtgttcccagctactcaagaggcagcggtgggagcattgcttgattccaggaggtcgaggctgcagtaatcacagcactgcactccagcctaggtgacagagcaagaccctgtctcaaaaaaaagaagaaataatattctatgtaatattatatagttgaatgcaagtttattgagtcaagtaagaacaggattcggagaaatagacttaaatgtcttcatgaaaaaaacataggggatgctcctccaaatggctcagatatttctgctggaagagatcatccctgatagtcaagacataacttacttgatattgaatcagcctaaaataagatggtccttgtggaccataaccatgtcacaggacagcactgccttgggtggcacagtgtagagtctggaaatgccatgattgtcacaggacagcactgccttgggtggcacagtgtagagtctggaaatgccatgattgccacagggaccttcctgttcagggtagcttttactatccatacactatgcctcctatccgcttactgtctcccccatcactcatcctaagaaaagcctcgctggccatctgaaagggtactgatttccctccaccttcccctcactcaaaagaacagaacgaggacccccaagcactgcatttaagggcagttaaaccgacacatgagggtccagcctaggggcagagcactgggccctctgcatgaggcctctaccctcagctgctccaagaaggtgaaacacaaagtgatccatgtacatctgcacacatggggaggggccatccccatgcacaggggaggagccggtccaccgacacacatttaccaggaagtccatctagacctgtgagcaggagggtgagcgggaggcagtcttggctcagttgtagatgagctgccaaaatttaaggagatagccagagaaggcatgggcagcagaattttggaaacaaacatccagaaaaaagagagagagaccaggagagaagggtagcagtgcacagatcttctccaaaatgggaaccgtccaccaaggacgtctgctgtaaggatcaaagattatgttagtctagatcccctcagccaccactcctcccacctccccaccaccaacactcacacactctgccaggcccctaaagaagagtaggtggcagttgctggtgcagccactcaacccgccagcactgcccacgaccacggggactggtgtcccacagtcctcctgcagagcagcacttagagggtccaagaggagaaagctgcccccgcaactggggcctttgtccctgaggactgcagtgcatctgactcagaaacgtgcacctgatgatgatcattctgttcgctgtgagaattttgtccacagtaagaacttgggaaaaagtctttcagtggctttatagacaattctaattgaaggggagtgagccaggagtttcaacacattttctcttggttccatcctttattccacagcttgtaataatcccctttcatcctctttctccctgcactgtactaataggctgggcatcccacatctctcatcatattctactgacctccttctattaggagagaggagagagagaagagaaacatgtacagaaaggagagagttgttggcgattccacactaggtttcatgaatggatatctggcttttgaataactcacacagcaaactctttttaagaacatggcattttataaatgggcatcaattaatctgttgtatgaatgaatgaagaacaaacagatgcctgcacaggagatagataccttttgtctgtgattcctaaaatgttgtatgctttggacctgtgtataaaaatgtattttatatattttcattggtcatcatgatttagctgcttgcttgaatgtattttaaaacctattgtggtgccaatttgtagtctcagtttaaagtgaattattctttgcatcaacaaatcacagaagtggtggttattttcatttgtttatagctgtctgggggcaaacatgcaaagtaatttgacttgttattactgtacgcctgtcgtgtttacaggcacaatatacatacaatcaaacataggaagaaagaagttctgtattacgcagggagtcctgcatttatataattatagagccttagaagacgttcatgttgattcaaagattgaggaaaacaacttcatctctcagaactctctctgcatacattgtaggtaaaagtctctttttcttcagctttttaatattctttaactttgaatattcaaataaatgtgacagtgtttcacctggagatgatttggtccaattgaaccacatttgccaaaatggcttttattctccccgttttaggaggcaccctggtttgctgcgaagccacccctgccgtcttgatgtctgtgctcagggatggctgaaaacagtcacagctttatcactgaagcaaacgaaaatgtaaatactttttcaaagaagatattgcactattatcaaaaaaccaaagtatttgcttattcatgacacttgagaccaacttaaaggctatttcttttcatttagaatgttctagaattgagcaaagcaaatattctttaaacaaggcctctgtgatgacagatcatttgatatacgactccatttttaaaatatctgtagctcttaaaatatttcacacaaggaatctgaccatttctgtttcgaagtattgggacagggtgcagtgaccctgtgagtcccagcatccccacagtgacaacgagctttccttgatggacacagagcacaggctttggagtctgagacagctggactcatccctccctgccacttagctcctgtgacactcaggggaagtcaccgctctgctgggatttagcttccatctctgtaaaagggggattaacagtgcctcctacacagggtggtgacagcaattaaatgaggaaagcatttagcagaatccctggtacataccaggtacggaaatgtactaggtagagctcttatgcttctcttgcaattgtttataaataggtcttatttattcccagggatgtattcttagcacatacttcattcattcatttgaaaatgcatttattgggtactcacagcagggtagtgtaaacatactcagaatacataacatactcagaataaataaatgcaggtgaatataaagacattctatttcattagttacattgaccttaaaccttctcagacaacagtgggtgagggagatgagagatggcagtgggtagggagatgagagatggcagtggattagggagattagagatggcagtgggttagggagatgagagatggcagtggggggcaggggcaggtgatgagttgcatttttgcaaaagctatataagaattgttatatactgttctgattttttttaatgaacctaaatgagcatggatttatttgctatggagtacttgaaatctttatttgaagacattaagaatccatccaggccaggtgcagtggcacactgtaatcccagcactttgggaggctgaggcaggaggattacttgagcccaggagtccaagaccagtgtaggcaatatggtgagacttcgtctctacaaaaaataaaaatattagccaggaatggtggcgcatgcctgtagtcccagcagtggggggcaggggggtggttcaggagaggattgcttgagcccagggaggtcaaggctgcagtgatccatgattgcgcccctgtactctgggcaacagagcaagaccctggttgaagaaaaaaaaaaaaaaaaaagaacaagaagaatccacccccaaacatatcaagataagacatccattgcttcaaacactgggccaggcagctgtatgttcccgctttcgttttcaggtaagaaaaatgaagacctagaccatggaggggacttgcccagagtccaatttcaagtccagtccggggctctcctcagcatccagcacacgcttccctgactttgcgcaaaggtcttgctcctgacagggaccgaattacagattctgccactttacccgagaattactctccaaacgcactggtctctttgcaggacacagctctctgcctccatgtcaccacctttgaaggactgactgattccctcggctggtgccagtgcctgctcctgccatggggcccgcggggagcctgctgggcagcggacagatgcagatcaccctgtggggaagtctggctgctgtcgccattttcttcgtcatcaccttcctcatcttcctgtgctctagttgtgacaggtgagaaccagagtgtatatacctgtgccttaaactaatacatcccctgtacccagaagagtttctgtggaaagcctgttaggaatggaatcccgccacagagccgtcccagaaacttgtgcattagctttaactctcttctctctgctgcagagcgtctcgggacattctttattcactgaaggaaaacccatatttggttttgctagggagcaactagaagagcccttatattttaaacttcccagaatgaaagtcttgctgttctttcgatcacacccttgtcaaaatggattttgtcttttttcatgtgcgggcattttgaaatcttgtgtgatgcgcatctttttgccaccaccctgcggaagtcacagaatgtttgctgctacgtgatttcggagggattgtttatgattaaaaatgtgtagtgtagaccttcagtttctcaagaaacagattattttccaaggagaggaacatgctgtatatgaaataatcatcagtgtcctttttttagagttatacttctctctctcctctgtctcatataaaatgtcagtacccccaacaagagaaatctttgctcagagagaagttctttctaaccagaagtgatgtttcaggacattctggaactgttacaaagcacataaccttctgataggctagatgccaccagaggcccatgcagaccagctgaccgtcagccagccctgtccaaactctccctccaccatggaagcaactccaggagcgtcacttaaaattctgaaatagcttcctaccctaaaatctgtcaggaggagaaaagccaagaccctctgaacccagctagcctcctaatccctgcccagcctggacccagacctctgtggctgggacagagtctgaatgattgggaagatgaacaaagaggccgcagggccggggcttcccggggcctggacggcctgcttctgtagttactcatgttcccactaggtgtcacccttgttttatagagaacgtggatgggcggcgtattctctacaactgatggctttctttagactgtcccgagtaaaaacaaattctatttttacttgacagactttcccatagactggaagtacatatgactcaccctgagagcatgtacccttcctggcgtgccaaaaatctgtattttctccatcccactgcagtgtgtgactttgcagagactcagataattgtcttcattttctcaaaaaaaaaaaaaaaaaggtataacttactctgctagtttaggtataaacaatttctacgcaggcccaggcctcggtcctctccttgtgaacttgtatgttttttcccggaagaaggggtgccaggggaggtggacagtccctagttgaggcttgaactcctcttccccagcacctgcaaacgggccatcaaatcactgtctgattttgtctttgttgacaaaataaacatggttcttaaaacgagagatttaaaagctgataagaattgggataggaaagggtagtgtgcgcttgattttaagggggcacatttgacattacaacatttcacttttcatttcagggaaaagaagccgcgacagcatagtggggaccatgagaacctgatgaacgtggtgagcctgcgcgtgtcgtctgcctgtctgtccgtgcgtgctccagaacatcagctacttatctaagtgtgctcccatgtgctcacagcctgagtagaacccacggggagagctaagcctaagttaaacggtggcttctgaaatggatgcagtagtgctgctgccggaatgatccttaaatggctccaacctactgcagggatgggacttttttgcctctattaatttgctagtgctgtcataacaaaggaccgcaaacagggtggcttaaataacaagtttgtttctcagttctagaggccagaaatccaaaaatcaaggtgttggcaggattggttgcttctgagggaaagtctgttctaggcctctcctggggcttctggtggtttgcagccaaactttgggtgtgacttggtttgtacaggcatcaccccaaattctgccttcatcttcctatggtgacctctgtgtttcacatcacctcccatctatgtatggctggctgtgtccaagtttccccattttataaagacaccagacatattggactagtgcccaccctactgtagcacgacctcatattaactagcttcgtctgcaatgaccctatttccaaatgagaccatattctcaggtgctgggggttaggacttggacatgaattttggagagacacagttcaacccataacaacaggtcattaagctggagggagcttgggacccacaacaccctaggtatataacctagccttgctggcgttttcccagccctcagtatcttacagggtcctgatgatcctgaggccctcagggatccaccctggcgaggaacagcctgagagtgtccaggtccttccttgtcctctctgacccaggcccgtgcttttgaatggctgagcagtcccagccgctggggagggggcccatcgtcacattagcaaggcagagttcagaatctgccctgagtcctgtggcagtgctaagacagaagatgcttcttgttcaggacatcatttctcaaggtcaagcaaaaactggttgggaggagagggtgcaaacaaggaagcatggatgagccaaggtctggcgtaaaacccgcagccagcagacgtttgcagagatgaccaggggcatctccagtctaggcttcctgacctgccaattctcaggactcctctggcccaagcaggcaggaagttgtcaggactccccgttcctcctgggacccccaggattttccttccctcccctctgcatccacatgcccacctcacccttcgcagctttcctgggccctcatcaccactcctccctttactctgtttctcgccctgttcccatccctggttgtccacattgtcgccacttctcatctgttcccagcgcccctgctctgcctggtgattgctgctgtggtggcctcagcagggagggtgggagggatggagggaacgccccactgtcgcttctccccatgcagactccaggcccctgcctttcgtcactccaccattctcctggtgccagttgggtggtgaggtggggctggggaagggctcccaccgccattcctcacttccttctagagcaggggttcttctgcagtgtggcctggacctccacccacagcagcagcagcacctgggagctccttagaaatgcgaattttcctgggggtgaggcccagtaaaaggctcgcaagcaccccaggtgatccagttgtatgctcgagtgtgagagccactggcctagagcttgggttcccgctgttctactcaaggtcagcagcagccctgggcgagataggaagagagtggcaggtggataaaaggaaaaagctggcttccatcccctgccttcttcctcatccaccatataattcattattgccccaacccatagcctcatttatatggatgtgaatgtctgtgagagagcgcgagcacacacaggaacgcatgcttacccggacactggcacccatgtacacacgctcgcccacccagctctccttaagagcttttcagctcctagatcttatacaacttgcggattcttcatctcatagaagcaaagattaggaatagtagttagagtctagattatggtaacttcagctgtgatcgattatgctgttatgggcccacctgggagtcttccttccccacacccatgcctgcccatttataacatcatttctgggatattagcacctgcattgcaagttcctggcaacctaacacagtgacccatctcactgggggctcatcagacgtgaatgagctgcattggatggaaacagctgacttccaatacacttttggatcattgcacagcatgaactatctgctgtgtattactggcttccaatcaagagtcagagaatttgtgaggccaactagcaaaggtttgtgtgctgtttacatcacaactttccttgtagaatcctggagcatgagatagcctcttggaacgtgcaggctgtgagaagaacagggagcaaatcacatttgcagtgatttgggctgcaacctgagacaagttgggtatttaaagaaatacatgaacaccaacttgctttctgactactcttagctatagctgagccaggcatattgttctaggtagcatctacacattctatccctgcagaaaaccaactattgatgccattcttccctccaaatgtcctaagtttatttgtaagaataagaaagatttgcagagctgggcacagtggctcacgcctgtaatcccagcactttgggaggctggggtgggcatatcgcttgaggccaggagttcgagaccagcctgagcaacatagcaagatcccatctcttatgggagcagccagacatagtggtgcatacctgtagtcccaccgattccagaggctgaggcaggaggatctcttgggcccaggagtttgagacttcagtgagctataatcatgctactgcactccagcctgggcaacaaggtgagacctcatcttaaaaaataaataaataaataaataaaaagtttgcagagctaattttcagcatattattgtttctgtgaacctagcagccagaggctttgctggttctaaaatagtttcagaaatcaatagccttatctatctctgaccagatttaagtctgttcccttcacatgacaaagggtgatgcctttccacgtttctcatagcatggcacacctttaccaataatgatttacagcacctgtgttgtaaggatgaggctgctgtggtctttttcaaccagttcccttcctgccttgagctaagggaattgatatctcacaacctgcctatagccctgtgtaggtcaccaggcaggaagctctgcacatggctttggaagattcccagtgcccctaagattctgggacaacagtgtctaatagaactttctgcagtgctggaagtgttctgtatctcctattggatatggtatccactggccacatgtggctattgagcgcttgaaatgtgactagtcaacaaggaactcaatttagtgtattttattttacttaatttaaatctaaaaacagtagctccccttaatctgtagttttgatttctgcagtttcagttacccacagtcaaccacaatccaaaaataggtgagaaccatacaagatattttgagagaaaggaagagcacattcacataactttcattatattatattgttttattgtcagtggttattgttaaattactgtacttataaattaaacatcatcataggtataacatatatggataggaaaagacatagtctatatagggttcagtactactcatggttttaggcatccactgggggtcttgaaatgtaccctctgtagataaggggggactattataggagattctgttttctgtttctgctgttttaattttttgaaaaagccatggatcttctcctctgctctgcagtccagattcttagcaatgtgatgcatttgtttttgtttttgtttttgttttcagccttcagacaaggagatgttcagccgttcagttactagcctggcaacagatgctcctgccagcagtgagcagaatggggcactcaccaatggggacagtaagttctgcaaaaacaccagctttccacacaggcctcatcacctctggaagtcctaggtttcaaaatacatagctcaaaaagtaggaaatgtgttattgctcagttttagtattcctagcagttttagcagaacccctcatttggatgaatactgctacttattaatccacttctgtgtgccaggcattgttctaagactggtacatgtactaattcatttgctcttttagtacattttagtacatttacatgtactaattcatttaccccacgagattactgttattaataataacactactctgtaagataggtattattactcctcacaatttaaaggtgacaaaactgggcacattgctgctgtaacaatattaccacaaacctcatgccttaaaataacaatttattgacttgcaattctgaggtcaggagtctgaaatgggtctcactgggctaaaatcagggcatccgtaggcctgtggtccttcctgaagcctcaaggagaatccattggcctctccctcattcttcacatccctctctgaccctcccccctccctattcacttatagggacccttgtgattacactgggcccacctggataatccaggcttccctctcatccgggagtcatctaattaacagccttaattccacctgtagccctaatccctccataccctccacaaaacattacacattcacaagttccaggaattaggagacagacatttttcagggtcgttctgccttccacagagatgttgctaatttgcctgatatcatatagtcagcgggctaaggatctgtagttggaaccaggcagtctgatccctgggcacgcactcagtcactctgcataacctctgcatcatgcattgtgtactcttgctgatggaaggagcagctaggtttccttcatgctttagagtttacaccatgcttttacctgaggtaagagggcgtcctgttacccctgtttactgatgaggaaactgtggggtaatcaggacaccagtgcctgttctctgtctaccatgatgtagacaactagaaccagagagcaaaagttcaccccctccgtgatgatcagggatttagaacacacaggggtgttggtaagttcagaaggattgggggatccgttgtcattttttcacataccccttggaaacactatttctaattcccccagagtgagacactaatggaataacttgcttactttgtgtctgcatcctaagggcagggctttctgtttcattgaatgatgtgtctgcagcaccctgcaccatccctggtgcatggcaggcactcacaacacggttgacaaagggacgactgaacagcttcacacaatagcatatctgtggctggccaagaatttcacatttggtttttttctaatttgaggtaggaatgttggtggcgggatgagatggaagcaaggtatgaggtgccagtccctttgtgctaatggctgacgggtgcatgtttgccctgtagtttctattatgtctgccaaacaaaagtcacctgtgtgaaagggggtggctaccaataattccctccacacaggcaggggtcagtggtgctggggactgtggtcactgcacatgctgcctttctggtgtccagcctcccatagttcagcggcatcaaactggtcatcttctggtcacattggacaatctgcctacaagagtctctcattggagtgacattaaggaaagtaattgtgaactacacttagagccaagataacttattaaatcttgtattgggaaagatataatgaacagctttattttaaactgtgattgaagtaggataccaactgatggtcataacaactataatttgtgcctgagacttaaataaaaagcacgcatcttgatttaacctaactttatattacctgattctcggtaataattattgaaagacttgcctttctccgcttttaatgtgtgtgctgctttagttctttcagaggacagtactctgacctgcatgcagcattacgaggaagtccagacatcggcctcggatctgctggattcccaggacagcacagggaaaccaaaatgtcatcagagtcgggagctgcccagaatccctcccgagagcgcagtggataccatgctcacggcgagaagtgtggacggggaccaggggctggggatggaagggccctatgaagtgctcaaggacagctcctcccaagaaaacatggtggaggactgcttgtatgaaactgtgaaagagatcaaggaggtggctgcagctgcacacctggagaaaggccacagtggcaaggcaaaatctacttctgcctcgaaagagctcccagggccccagactgaaggcaaagctgagtttgctgaatatgcctcggtggacagaaacaaaaaatgtcgtcaaagtgttaatgtagagagtatccttggaaattcatgtgatccagaagaggaggccccaccacctgtccctgttaagcttctggacgagaatgaaaaccttcaggagaaggaagggggagaggcggaagagagtgccacagacacgaccagtgaaactaacaaggtgggcactggcgtttttgttttgtctttgtgggttcctgttctggttaggaatctagctggccctggagttgttctgggaaatatctgcaaacactttccagtttgttgaatgatgagagctgttttcatgtaagctgtgtttggctttttccccctccaagtaataaaataccaaaaacttgtatttatcaaatatttctctcagcaccttacttggatattttcacattttttccatcatgtctaattagggccaaatcttgtttgcttcattttgatgtccacaaattaaatacagaaactggacactttgcccacacattttacccattctgcttgttggctgcctcagcagcatggtgacctttccccttccaggatccccaaaaatcagcatgcatagcaacaggtaccatgggaaccaactcacaggtgcccctggttatatctgattgtacaaaccttcatataaatcagtaggagatcttattttgtgaccctttctaaactatagcctatacttcctaaatttagatattcaacaaagctgtaaaatgcattagcaatccacaccttctgcatgtgtctgataacttgatatctgagccacgatgaagttcacatccctggttgttaaaatctctttgggatttaactaggcccatctacttcaggcaactaataattaatttctgttttctacacagaaaaagaggaaggttctctcttctattcagttttagtaggaaggacaagtagcaggttagccagtcactagtagccttaaaaaccttccgtagttcatggccagaggtgaaccctcactctgtttgtataaattagaccaagaaaatcattctttgtgctgttctctgaatgcatttcaacttttcatattatccatgaaatcagctgttgagagcaccaataaaagggtttatgaacatgttcataaaatataaaaatgcagtccaattttttgcccttcatagaaccaaagaccataaacctgatgtaaagttcatgctgcctaaaccagacaaagctttttacttacaagcattagaaagataagacgttgagttgtctaaccattgctagtaaacagttctccagatttcacgttaaaaactggaaataatcatctggaaataaaattatccttccacaatatagtaaaaatgagtaatccatcatctttatataaacaaccctaattttaagtgagttgagggtttgaagtatttaatattcattcatttatttaacaaaagatcttaataagcacctgctgtgtgccacacagtcttctagtcctggaaacaaaacatgtacatgaacaaaatccctgccctgtggaacttacatcttagtgggaagagacagacataaagtttaaagtttataagagaaaaaaatagaaccgaataaggggaactgagaaaacaggtggggagtacagttttggatagagtggtcagggtctgcccagctatgaaggtgacgtttgagttaaaggatccaagggggtgaggtttgtgcttttgtggaaagagcacgtgaagcagaggggatgcccagtgtgaggcccctgaagctagagcttgcaactggctttttaagggaagaggaggggactgctgtgggtggagagggaagagcaaggacagcagtgaggagaaagagaaccagagctcgatcctggatggccttggcttatagtctgaacactaataatgtcactagagtcccgagcagcagaatggcacaacctagcctatgttttcaaaggatccctctgactccagttttgaaataaagggtagaagtgaggagaacaattgggtagtgactctaataaaccagattagaaatggcggtggcctggatcagggaagaggcagcagaggtgatgagaaaagctaagccagagccaagagatttgcggatggatcctacgcttagtgagataaagaagaggcagtgatgagtacgaggctgggcccaacatgtgggaaagattgaattgccattaactgaaatgaagaggatacaggcagagcaggttttggggggagaaccagcagtcagtgttgggtacgttcaacttgagataccgattggacttccaagtagagcttatcagatggtagctggattgatgagccgggtaaagaggaaaggccagggctggatttgctgatgtgggagtcatccacagaatgtggttttaaaagtcatgagattgggtgaggtcacaggataggtgagtgtaaatagagcctggaagagctccaagaatagagatctggaaaaggaaccagcagaagagaccaaagtaggaaacaaaaacaggaaagttgtggagtcctggaaggcagtgaagaacgtgtccaggaaggaaggagtggcgggccgctctgccaaatgcagcgggtaggtcagggaaggcgagtctcattggtgcccttgacaagagcagtctctgtggaatggtagaggcagaaacatgactgaaatggattagaaagagaataggaagagaaaaattgttcggttgactttttagaccactctttaaaagattttgctataaagaagtgagacaggctgggcgcagtgactcatgcctgtaatcgtaacactttgggaggccgaggtgggtggatcacttgaaaccaggtgtttgaaaccagcctgggcaatgtagcagcaccccgtctctacaaaaaatacaaaaattaactgggcatggtggtatgcacctgtagtcccagctacttgggaggctgaggtgggacaatggcttgagcctgggaggtcaaggctgcagtgagccaagatcacgccactgcatcccagcctgaatggcagagtgagacgctgtcaaaaaaaaaaaaaaaaaaaaaaaggaagtgagataatgagtaggtagaatttcggagtaggactaggtttgttttggttttagaatgagagaaacaacagcatgtttgcatgtggctgggaatgatcccacactgggagaattcctggctcagtattcacacataggtatgtggagacagggtctagtgtgtaggaaggaggggatcacctgaaggaggaacatggaaaatccatttgacagggaggaaagaaaatagattaacgcagaggctgagggtggggctaagagttgatacaaatttcttctgattccttcagttttcttagccaactaggaagcaagatcatctgctcagagtgaagataggtgaggaggtgttggaagtctggggagaagaggagaagatgcaaagtagactgtgagttgagcagagactgagtatactggggaagcatcggatgatacggagcggctttaagggctcactagagggttgagttcacgtatgattggcagttgactatggagcttaagcttagtaaagcagtacaggacaccaaggagaagggcagactttgaaagcatgaatgggtcccaatggtgttgaaggagcattggaactgggttacagaaggagtgagctttgacaacgagcgctggtctgaaaggggttgcaaggacttgggctggtggagaggctgtggtttagaaaggcctggggtgcagccatgagggtgctgaggccgggggtggacatggagaggggacacagatagagcataaaatcagtgggggaagggaaagtcaaggaactgaagggcgggatttagaagggtacacgtttgttgaggtcaccaaaaattaagacaagggatgtgttagagaatcagtaaaccaagagccaaaatccttcagaaatcaggcagggggcaagacacaaaatgtgagtcagtttctccattagctttgaagtttccaaatgacttaaggatctttctgatgacgccagcaaactgtagaagtataaaattcaggcatttgataaagaaacaccatgtttttaaatattaatcctccatggatgatcaatccttcagtgacaattaggaattgaaacagtagtctaaataattattttggcttctttgtacctacagatgcaaatacaaaattagaggaaatttctctaaggataatactactagatatccccgaacatcatacatgtggtaatagattgcataagtgtttctcttcccataatttcttcgtggttccataaaaatcatttgaaaacgttgctagacagattatgaggaaacatgtgcaaaagaaaggttagattgttaacgctgaattactttccttggcttgtgtttgttctgacagagatttagctcattgtcatacaagtctcgggaagaagaccccactctcacagaagaagaggtaagttttgtttctttttaaaaagggaaaactgtagtaaagaatagaccttccccccttgaataaatgcactgtaatgttaccctttgaaagagctgaaatattctcctatgcctatgtttggagatgaagacttgggatgctggttttataatggcttggagagactgacgggcaggccagacaagaaggatggcaggacaagtagtcagctcaggaaaagaaactgagcaggaaagcagggtcaggaaaaatagagagggcaggggagaagagtgagaagagaaaaattccagcgtgggagcagtcagcagtcaggaagaccacatcagaaggaaatgaatcatgggttggaaaattcaggaaattagaacaggtgagtgtagggaatttgctccagcctgggagacagaaagaggaagtctccgtggggaaatttggatgctgagagcagattaacttcagtaagtacagttccaggcaggagctagggtcagacatagcagccaacaagagcagatcgcatattcccaagcaccagggtgcaaaattcacgagttagattttcaatgaagcattaaaattgttaaagccagtattatacatataatatgaaatatgtgtatatatacatatttcatatgtatatatataaatgttgagctatgctcagagagctaaacaccttaattgatctagctgtatatagcttctatctggaattcctagcagagtaaattgtgtacatgtacaagagcaaagtacatatgcaggtacatcacttcctataggactctgagtaaagcattagaatatggacatagacacccacgttgaatgttcaaagagcaaaaatgctttccctaggtgatattgcccaccctcgtccatgtttctacctccagaatggacctgccatctgtctatctggttgcacagaccaaaacctaggggtcatctcgatacttccttttcctcactgtcctccaacacagtcaattgccaagacccatcagttgcacctccaaactgttttctttgtgtacccacctccctcaagcccactgcggccgcccctccctaggccagagcagtcccctcctgctgatccctggcagctccttggcctccctccactctgttttctactctgcagccaaagtgatcccatctgggacaagaaggtaaaatatataggagttctgggaattaaagactatgtaaaattttaaattgctccttatcttacatttgtttgtattttttgaaacaggacctagttatactgatgaatttttaacatgacagaactatgactcacagacattcattttaggacaaagaggaaaaataaatatgaaagttttttttgtatttatgtaatttaatgttaaacagtccagactgaagctgagatctgagctttaagttctattaccccaatttaacagaatgttatggaaaggattgattagaaaaagaagagaaatggggaaaaggaagagagtaacttatgggaatatagcaacaatttacagactgaggaataatgatgaaagttttaaagagaaaaattgagaagctaaatagcaagggggctggaagagaaacctgtatacaaaataaaaataatagtcataatggtcatagaaaacagtcaaaaggaatatgagaagactcaagaagcttttataaaagttgaaatgtacagtgagaccctctgcacactaggttcattcccagagtcaatattaaattgcaagttaatgaatgaggacaaaggccaagaagaccaagtactcttacaaagagtgaggggcattaattacaaagaccagggggaagaaagctgaggagagaagctaacggtggtgaggggctgactctcattgttacaatctaggtcaaggtacatttgtcctccttgatgttaccaggtgatgaatacgctggtatgccgtctcccctcaccattgtcatccattgtttacctttttataatctgtccacatataatttttggcttggaccaccatttagataatacattctgtgtttgcacttccttataaacagcagtgaattttttttattaaattcaaagaaattataattcttgtattctgagagcagttttttcattaaaacctctaaggtgagaatgttaatcatttcatattcattaggatagtcagatcaacatagtaagagttttccaaagactgtttttctgaactgtaaacccttggattgtcaaggcctcaccaaactgagccagccaccagcctgtaatgaaaagttctcatgcaaatgaccagttagcatgtggcaggcctgtcttaagaagcttttgagacataagaaggcctgtcttaagacaggcctgtcttaagaagctggaaacttcacctgcagtatgtgagaaaagtggaagcaggaaaatgtccctcagcccttgggaagccaggcatctgtgaggaagcatgttcatgtatttcctgggtatttgaatgaatcaaatcactgtgataaaaataaacacaggtaatgaagggtatttttacttatttccaaccgtgatttttcacaataaaataatactccccaaaagtctcctaattagtatatttaatcttcacaatgaatgaaatccctgttgatatcggaggtgatacaggatttattagtgagactgtgggggtgtgcttggaaagccactggctcttaatagtatcctgtaagttgtcatttctgacttggctggttgcaagcgagaatgagttttcccactgaagaaaactagacctggactgtcaatgtctgtttaaccagtaatacgcaactaagtcaagaaataatggacaggaataccctttcagatatatgtgtaccaccaacgagaatccagcaacgggtgttggagaccactgtgatgcaggaagcatggagtagtctaattcagagttcttatactttactggccatcagaatcagcaccggttgctgggccccagccccgaggttctgatttggtggttctgggatgaggcctgagaacttgcctttctgacaaattcccagatcctgttgctgctggtttacagcccacactttgagaatcaccggtctactatgtgttttctgtccttttttgtaaagcagtggagccccttttcaggcaaaatatcattctgataaagaaatgaaataaaacacatgctgtggtcaggtccccggggccttcaggagcttcccactccacctctcctcaaattcctcggcagacccaagagaactgggttttcacggaattaagggaatatgactgatctagttaacatagttgaagatagtgtgtgtaattattctctagtaatgtgctccataattagtacagataagaaagaacaaatctttaaggagtacacacacagaaacccaggagtgctcagtatgtagcttgtcactaaaaagagggagggggaagtcacagctggaagtttattcaactctccctttgtctcctagatctcagctatgtactcatcagtaaataaacctggacagttagtgaataaatcggggcagtcgcttacagttccggagtccacctacacctccattcaaggggacccacagaggtcaccctcctcctgtaatgatctctatgctactgttaaagacttcgaaaaaactccaaacagcacacttccaccagcagggaggcccagcgaggagccagagcctgattatgaagcgatacagactctcaacagagaggaagaaaaggccaccctggggaccaatggccaccacggtctcgtcccaaaggagaacgactacgagagcataagtgacttgcagcaaggcagagatattaccaggctctagcaacccagaagacaaccctgggtagcctgtgatcagtgtctggagacgtttcttctgtggaagagaagaagtgacacaaacctatacttcatatgctgctttagtcacctgaagatggttggagaggccctgtcgactgttctcccagttgttcagtttctgagacagagaggtacggactaggctgcacctgagtgtgcccctgcctgccagatggacaggtacacccaagcacatctccctgctgcaccctcaccacccacaaaagatcccagctgtcagtggtctcatctcattagtgaggaaagccaagctgtatggaaaagctgcactcaccaaggaccacaatgcccccggcctaaagtactgccattcagaaaagcaggtttttcttcctctctttccttttctctgtctgctactgactttaaggctttttcccccttgaaatgtccagattcctgtggttcatcccaaggaaattttcacacaaagcttggcctttgccctcaatataggtgttttaggatggtgacaaaccatggctgctgctttctgcccagctcgccagtcctccccaaagagttgcgcatcagcacctggggatctggaccctgcgggtgaagggatggggagggacgtccctggagtctcttctgtctttgttccttcttattttggcattcgatatcagcagcctctccccaaagtacttgaagtcagttttagatgctttattttatttttctagtcaaaaacgtgtttcccccagtgtttgaaaactcgtccgaatcttttcagtattttccatgagtattgtggtacttctagacttgtttaagcccagaactcattccttcaaaacagagagccttaatctttatgttgggacacagaccacatatttggacggcagccatgcatccatcgctgaagggctgtggacatgaatgtgtatttcccatggtctccgctgcccacaccaacagtgtggcatctcataagttaactgctaccctaaggtaatctaagattaaaatgtaaacatttatttttgttatgtaagtttataagatgttttatgttcaatgcctaatttctcaaaagtgccagaaaaaaatgtatattagctattttgattttatgtacaatgatttatactctccttttgaaaagataccataaagcacataagctagatcactacaaggagctgttatcttttttctaatcaagtgtttaaaacactgatggtttttaaagactcacctttttaaatggtacttggagctcctgattcaaattacctagaccccctagagaaataaatggaatatacataaataatcattttcagtggtttatggtgggcaatattgcaatatttgaaatggtaaaaatggaaagaagaacaaaatatgatgagaggtggctgtgaattataaacctcataaaagtgtcataattccattaaggtttaattatattttttcagaaaacagtgatgaattctgtagtccagtgcttgccaatgcaaattgcctattggaatcttcttcctatattttacaaacatcagtggctgaaatagctcagagtaagagctcagcctggtttgaatttaatcatctctttagatcttataaggccagcattaggaaacttgttcacttttcattttcaaaggagcctagttgaagtgctattatgagtgtgggctatggaaagacagcttttcctacactgataaagaaaaaaaatgaggaaattatttcatccccttgtgacatctgtgactttttggatttaataatcttgctgtttttcctctttatgacaaagaatataattgggaggatgaagtgtcttaaaaattgtagagaccagctcactggaatgtttttccatccctgtattcatggcttgactttgtgactgctctacactgcatgtctgacattgcagagtgagctatgttgaggtaaactggttggttgtcattattttgcaatcagcctggtctctcccatgaagatgtcgtgtgcataagcacaatcatcactgattagaagatcacagcagaatacccttggattagagagaagttcgtaccttgcatttctctgaattctagtctctcataagcactgctttgctggatgattttcactgctttgtgttaatgactttgagcgatctctcacatgatggggttctttagtacatggtaacagccatgtcatcttacacacctagcattgtgaatgctgtagtgacatcctttataggcaccttacagctcaaaacttttgtttcatttcatgccttacttatcaaaaaggcaggaaagtaggtatgatctctaaagtaaaaaaaaaaaaaaaaaaaaaactttttatagaaagctcataaataatcatgtcattttgcaattttgttaccaaaatttcccccaagagttttcaaatattagttctgcaatgtggctatgaaatatgcactgaaatataccttttaatttgagaaccagtggttagaataagctgtgatataaagtattttcagtgtacttttaaaggaactataaggccctccagcataaacgctaaaagaatagatggtagcacaggccatgagggctgggggagagaagcagagtgaaccttagaaagatggctcagctatttggagcactggatattttactgaagttatttactgaggcaccatcactgttttgactgtacagtatagtttttcataaatttcatcacatttactttgttcagaatctgggcttgaatctttgagttggacaaaagcctatggtttcttttaaaaagtttcatcttgagctaatgctacagtttaaataaaatgtatgaaaggtagttatcaaaaacaatttgtatatttaaaattctattttgacatccattttttacagcgaattatagcaggttatgtgaaatttaaaaataaattttaggaaatttttttatcttgtaagtaagaattataaatctatctcagttaaaagtaggatctttgtttttattcagatattttgaaagtttagaagcattttgtatgctactttggtatttcttaagtatagtcagcaggaaagggtaacctgttttatgcaaaatttttttaatttgtcaaatgtttttagtgtgtctactttctgaaatagtctcaatatcctgtctgtatcctaggcagataactacacaagaacaaaacgctatatagaaaagaaaatatttgaggaaatcttaaattccataagaaagtaattcttgcaagaatgttggctacatatttttttttctgtcctgaataaattacatcattaggtctgttgaagcttttgaagctaccactattctttctgggataaaggctaattactgatttatctgccctcaaaatcccagagttaattctaattgagtactaaattaacagtaagtagttaacacagagaactaaaatttaaccgcattatatcactgtatatatttctcatgatttttgctaattagagcatttacttaaccagtaataaactacacacacacacacacacacacacacgtatacgtgtgtgtgtgtatatacttggctctgacacaactctggtgcttaattaggatatgttctattatgtattttgaatgtttatcctgctagtgtgatgaacttttgttggaaaagcagaattagaaggaacagtttttcaatcagtttcatttggtaattacaggaaaaccttgagttgctctaatttaatttttccaattaatacatttagactttaaattgcatccgtaattctcttggctgaaaaacagtggtattttaagacagttttgttatacatgtgacttacttttgactcagcctgagaggaggaaatgtaaagagataagagatttggcccaaagcagcaagagactagtaaccttgagccaggacgaagccaagacaacgtgactcccaagtagcaggagcagaggtcggtcacctgtggcattctgtttcattcccttttaaaattatgagactttataggcagtgtaaaacatcagcaggcagcgatgtgataggatgtgcgaaaaagctggtctgataccatggctataattacagagctttagttcaattaggattttgtaaatgagcaaatgacctttttttccagtgccccttgtaatagttaatatgagtccatgcaatcttgtgatgccattctcctgaaggtgttgatttctggtacccagccagcttagctttggctgctggaagcacagtaggtactgatgattacttcctggaaatcttgacaggcttattgtactgtgtaatggggaaaagttaaagtataatgtttggtgttaataaatgactgatgtgaaaataggaacatgtgtctttaatatcaaatatggctttatttgcagtgaaatctaaattccttattctacagtagtattttcttgccctgtgttgtatattttcctaaatacatttttcctgacagtggctttaggccagttgaacacacttagactgaaagtgtttaacttaaagagatcagtccagaaaccatgataaattagaatctttatctggaattaccaaattaaaatttaaaatcatggtccagaagagaacaaacattcatggttttttttatcctactgctcatttttaggtctgtgtttacatctagtctctactatttgtgaagtatgtcattatttttttcaagttcttctttgacttaactgaaaaataatattccaaattcttaatgtaacatgaaaagagaaatacaatttttgcttaaaagacattttttaaaaagcgttcaattcagtaatcatttctgttaatacaggaagtttttttggcttgccagttatatactgtgggtattttttaaaatgtgctacccttgggttgtctcatatcaccttgcgtaatcatgtattacaaaggttgataattgtcatttctcagatgtctgtatgttacattggcagcagtaaaatgttttaatgttgttaccttttaaataattgtgttgtattaacatgcctcatattttctggggaaacttgaaatatatctaaacaaaaaaggtctgttataaataggaattggcatttcattgttaatgttttttcctcataaaaatagttacaccaaaagtgacatattgtctattacatgggcccaatcagtattaaagtactccccttactcaaaaatattaaaaaataattcatgacacttagtagcattttcattgattgtttcaaaagatcttcataatggtcaaattgtccaattcacaaaagagtgagaaagttgttttcagtactgggaatttttaaaccttagttttaagaccaaaaatatctcttattagcttgaacattttgtgattacttttccctccccggatctagtccttttaaggagtaagtctaaagaatgaggccatgaagtcactatttcctcccacctcagtttgtctcctggtacttagctggcctatcgctttgtgtggcaatacccctgggtcgcttccccactcagccttctgtatctgctgttcacaggacatgccattatgtctttccagtacggatcacagtgctgccatatcacagaccctgccagccggcacagaaccatgcctcgtcacagctctgcccaactcacaggctgccaagatgaggccacaggtccacctagggcggcagatgctggtgctatttgtcacgacttttgccaaaacatgtacactgttgctcacatctttcgtaagaatggttgacactaaggggccatggaaaagcacttttaaaaaattatgtggtggaatcaaactcacagaggcagaaatgttagtgccgtgctctaaccaagtaagcttagtgttccccacagtgatctgtatctggcctgagtctcctcaagcagcaacccccactgtccagcatgtggaaggtagatccttatgacaacaccagacccatagttaccaggaaagaaaaaggaagctgagtgttgtgaaggggaagaaatcctttttataagaagtaatcatttttaggccgggtgcagtggctcatgcctgtaatcccagcactttgggaggctgagacaggtggatcacttgaggtcaggagtttgagacctgcctggccaacatgatgaaaccctgtctctactaaaaatgcaaaaaaaattagccaggcatggtggcatgtgcctgtagtcccaactactcaggaggctgaggcaggagaatcacttgaacctgggaggcagaggttgcaatgagctgagatcgcaacactgcactccagcctgggcgacagagcaagactccatctcaaaaacaaaaacaaaaaaaaaacctttttaaagtaaattgagtgtaaaatgttttcaccatgaagccattgcaccctctcccccaggaaacagtgcctaaggatgatgtcaagttacagccagtttgctctgatcccccaggacctaagaaaactgtgagtgcttcagcatgcaaaggtagagctaccagataaggagaataacttggccatttatagcaaactgcctgactttggagtgagaaaccaagcaccttctaggtcctaggataggtgaattggaggtgcagctgctgaagttcccattttctacatacttcaggagccagggtgtttcatttggttttgtaaaactttgctgtaagtcatcacagttaattctttgaatggacattttagagtgtaactttttttcaaaattagcagaacagatatctctgctcattctctttatacatttagttttttaaagttcccctagtatacctgttaggcactctaaataggacacagttaaagctaaaagaaggaccagttgctccctagagcctacagttcagaactatcttgttgtcatgtcctggtttggtttggtttgtttttaactcaacaagttggaaaccatgagtttaaagcaaactatttccttttcttaagcttaaagagaattttttttttaatctttagctcctcatttaggtagtgaaggcttccctgaaagacagcagtgcccttctctggaagaagaggctgggaccaaaagcctgagtctatgggttgaggattttgagcattcctttgacaagcttctatgtatttttaatataagactcataaatgaacctgatgtggtgttcatgacccatcccttaagcatgcttgctttttttaactttactttttgagtatagtacttgtcttgtttttcctggagccatgctaggatttaattcctatgtgccactacccgcccatgtcctggaagatggccatgcctgcagcaatgctcatgtcttgaggagaagcaatgtgaaaagcatcaggaaagctgaaccttacgttcaagtcagcaaacatttgtgagcattctagtatgcttgcgaccttgacactttttaaaaattatctttttatttgcttcgagtatcaaccgtatagttgactctagtggggcgaagggagcagagatgagagcaaaattcagacttgctgcccctgtgtgtctcagttctcatgtctctctgagaaatgtgttggcccaattccctatctgccactctgagtctcttgagtaaatgtgtgtaaatgagaaaaattatctcaaagatttaacttattatttagatattttcttctttttaaactcaggaataaacctggtttgtagataatataatatggctactagagctataattgagtaggtgactagaagcattttttcaaatatatttcttgtaaagacatctactttgttttaactaggaaaagaaactcctcatattaaaataaacatttccataagcactttctagaagagtgtagcatccatctaccatccatcccagaatgtttgtatcttgctcatagtatttcaaaaatttttatgggtgaaaaaaatgcacttttttatttattggaaaagtgtagagttattgaattaaattctcaagtgggacaatttagtgtaaagggaaacatgggttttggagacaagagcacagggctgtggtccctgttccagcattgactttactatgtgacctcgagcaaatgatttaacttctctgtgcctcagtttctccatatacaaaatggggataatgatactaaccattgcctacctcatagagatgttatggggacaaacgaaataatagagataagcacgaatgctttcaactcttcggaagaaaggtgctatataaattgaagttgtgtttttaatgatccaattattaattatgtttagggtttaaataacaatactgttagtcatgttaagaataagttttgttttgatgcatatttccacttctcttctgtggccagatcttgatcattcaaccagtaatggtacctgaggaactgaaatgggtatttgttttcgtatgtttctgccagtagtatttcaattgaatatccagaaaagactggagtttaacttgtaatatcttatagtttacatgtaataaaacttattcaagctatatataaaagtatgattacatgtaaatagcaggtatgttgtaattaaaggcacttatcaaattgtctttgttcttttttaattgtaataaaagtcagttttacataaa

SEQ ID NO: 49 - DNA, 1653 bp, Homo sapiens
cagagactttgccaccaccagtattggggatgctgagctgcggggtacgggcctgaggagggatgggagtaagaagtgctgtggaaaccgtcaggccatgaaccaggctgaccctcggctcagagcagtgtgcttgtggactctcacatctgcagccatgagcagaggcgacaactgcacggatctactcgcactgggtgagctgggcagggcaggggctggtgggggaggggtcatgtggccccaggtcccacctgctgggccctgggggtggggcggggctgttacaccccccttcctttcacatccacaggaatcccctccataacccaggcctggggactgtgggtcctcttaggggctgtgacgctgctatttctcatctcgctggctgcacacttgtcccagtggaccaggggccggagcaggagccatccggggcagggacggtgggtgaaggacaacagggatgggttgactgagagttctctcttaccgagaagtccccactcatcccctaaactctgcgttgcagctctggagagtctgtggaagaggtcccgctgtatgggaacctgcattatctacagacaggtagggagctggcagagaggaggggcacagaggccaggtcctgggtggctgggatgggggcgtgcaggaggaaggacaagttgctgaccagattcctgttccccgtcccaggacggctgtctcaagacccagagccagaccagcaggatccaactcttggaggccctgccagggtgagtcaactgtggctggagaaaagggggagggaaggaagtggggggcttttcgggcttttccgagggtccagtgaacttctaacagccttgcatctccaggctgcagaggaggtgatgtgctataccagcctgcagctgcggcctcctcagggtcggatccccggtcctggaacccccgtcaagtactcggaggtggtgctggactctgagccaaagtcccaggcctcgggccccgagccggagctctatgcctcagtatgtgcccagacccgcagggcccgggcctccttcccggatcaggcctatgccaacagccagcctgcagccagctgagatggagggcctggcacagcggggcgtgcactgccccagccccccgtagcaggggcatgactgtttcccaaccagcacccaaagacgggcgccattgccaagtcacaggatgtgatctaccccggacttcctatctgagcttcaagggagacatctcagggcaaagctttcgtgatggaggaggcaaagacagtagccccctccttatttcttttttctatctgttcctcttagcccccaaactcccaggttctcacttccttcttctggagtttaaccagatcctccccacccccgctccctcatagtctacccccacgcctcagtgtctcctcaggcacaggaagtgggcggtgggggaggggtaagggcctgacagtgggtgggtgggtatattcctcaggagtccacagactggagtggacctggaacttagagacgggagggacccgagcctggcttttgacctaagaaccctagcaggagaatacagtctccatcctgctgtctctgtcctgtccccaagttttcaaataaaactttccaaaaa

SEQ ID NO: 50 - DNA, 14392 bp, Homo sapiens
gcacacactcatcgaaaaaaatttggattattagaagagagaggtctgcggcttccacaccgtacagcgtggtttttcttctcggtataaaagcaaagttgtttttgatacgtgacagtttcccacaagccaggctgatccttttctgtcagtccacttcaccaaggtgagtgtccctgctctcccctaccagatgtgggccccattggaggagatggcagggaggtaggcacggcgggggggtcaggggccctctggtacagtgggatgtacccagctaccgtgattccagccaggtaaggtctttaaaaaaataataatagaataaatggcagaagacttaaaggtgaagtacttaatgcatgggcaggggcaaaaataaatgaattcatcaattgatacgtagatggataggatttttaaaatatgtcagctgccagtctttatggatttcagagctttgaacaacttgaaatgctgtccaggtgcaactgaaaatttcaactgcatctctctcatctctttgtctcttagctcttgatgcctctcatccttctctgtctctctgctcaccctgtcttgctcttttacatgtttctctgcctctctttctcccgccatctgtctgtcgctacactcagactctctttccccgcatctctcctggcctctgaccatctcccctatctctgtctcctccatcttgaccacactccatcgatctcctttcctccatctctcccgctctcttttcttgccttcccccacctgccttcccagccagcatccagcctagagctttgtacacagctggcgtttaataatagtaatgtcgccgaggacctttacattttatgagagtgagcatcagttctgttcaccctagtagcaggaggattgcaaggtgccggggcaagctgagcacttaactgaactttgcttgtatcgctttagaggagacccttggggcgggggggcagggagcacttcacaccattgtcaaccgtagtttagctgtgtggacctaccccaggactgcatgtgtgtgaccagagtccatattcaggaagcaaacaggttgttcagggctggggtgagctcgattctgcaggcttagcacagcgtttggcacaaagtaagtgctcacgaagtgttagctattagtatttctgtaaccaaattagaatcatgctatatattggttttgttcctgctttattcaattaacagtagtgtttttgaagcttactaaaaattgtttgaacacatgatctttcatgatggacaagactgtcctcacatcagcatgaactttgattgatttgaccaagtgccgattgttggacattccggttgtttctcgtttttttctataaacatccctgactgcttccttggattcctgaaaagggagttgctggggcaaagggggcgtgcatttttaaagtttatgaccctctctgctaattctccttccaaaaggttgtcctattttatgctccctctacttaagctaaccctaggtgagtattattatgttttaattatttcccaacatgacaggtaagaaaaacacattatcacattgttgaaatttgcatcttgtgattacttttactattcattggccattcatgcttttttttttttttttttttggttgtctggtcatgtccttactcctaatagggtgttcatcttatttttcccttattgatttgccacagctctttatttggaatggttattaacctttcatcagccattacatatatagcaaatattttccccaattcatcatttgctttttttctatttgtttatggtgttttttgtgatgcttatgatggttttatacagtcaaataggttagtctttttttctgtggcttctgtctctggttttgtgcttagaaagtcctttcctacttgaaaatgagataaatgttcacctatgttggcttctagtctcttttatggcttcattttttccatttactatagaggttaagagtgtgggtactggagccagactgtctgggacaaacccagcgtcaccccaagccctatgtgtgatttttagccaggcacttaacctctccatacctccatttcctcatatgtactgcaatggttataatagtaccttcctcaggagtctttgtttagattaaaatttttaaccacagtaaatacttagcacaaggcctgacacacaataaacccaagatcagcattaggtgttaaaacttatatcttgaatggatctgggcattttagggtatatgatgatggtgacatttcaaactgggcagggaggggttgttgggataatggactgactattcactcaataactttatcttctccctaattatctcagacacatttgttaaaccatactccatggtcctccagtttgaaatgccacattcatcacaaattcagttctctccatatgtgggtccatgtccaagctttctattctgttctcttccccagtatctgttcttataccagggccacactgttttgctgattgttgctttgcaatacaattcaatacccagccatgggtgtccctggcaccttgcccttctttattcttgattatttcaggcagcatcagttgaaccagccagagaccagcaaatgttcttatttgaggcaatcctcctctcgcacacatgcactctggctctccatgcatgtgtccatttctctcaatgtctctcactatctcttgttctctcttgctcgctctttgtgtgtgtctctttgtctctatgtatccctatctctcagccagtcccctggatagaggggcaattgtcaacttgaagccctgcagacacctaatgacttaaccagacagcgtagaagggccctggcccttgtctactccacgcctctccgtgctcagtgtagaagggcaaattgaagaccagagatctcagggcctcaccgaaatgcagcggcagagttgaaatccaagcctagatctcaggactctaggtgggaccctggttctggctctctccccaactgaaggcctcagtttacccctcagcacccagaagggggaaggggaacctgggctaccattcccccttctgccttctcacacgttggaccccaacttcccacaggttggacgatccacgatcacagtgtggggcccagcctcacaagagctgggctaggtgaggccccggactccataggtcaggaggcctagttggccagagcgtggtgatgatggaggcatgtcagtcagtcaggctgtgtgtccccagagctggtgctggtccccgaaaaccttgattgtggggcccctctagagagtctgatgatgggctctgtattggcgaaggctgaggcttttccagctccccccatgaggcccagaccaaaggcacaccagcctcaacctcctcctccccctgttgccatctctggcggagtggccatgtatttgggaacgttgttccagagtggacagggagactgaggccctagggaggctggctctgtttccaggcctggtaggcaagaggccctatgaagcagcaagctgcctgactttcagatggttccaaggagtttggacaccagggacactggcctacacatactgagactttgggaccgtagaccccacagtctgtggttttgagattctaggatcctttaaatctaagaaatgctgttctatgattctgaggtcctggtgttatactatttgaagaccccaggggtcccagtatctgtggagcctgcctggcactctcagagcttcaaacctgggtcctctccacaacccaagaagggccaggtcttcagagctaggggcttgtcatagtggccagatggacatcacctaccacatccaccagcacccatgtcaccccacctgggccaagcctgctgcaggacagggcagccagttctcggaacgaaacctgtggggtggggtatctgccctcttctcttcctccgtggtgtcgatgaagcccggcgcatccggccgccatgacgtcaatggcggaaaaatctgggcaagtcgggggctgtgacaacagggcccagatgcagaccccgatatgaaaacataatctgtgtcccagaaacatcccccattcagcttctgagaaacccagtcagaaagggacgtcccaacagacagtgcaggaagccggctgcccagcccggccctctaggtcctctacccccagacagatcatctccatgtccctgtctgagaatgtatctatgctttgctgagtcaggccatcccacatgtgtttggggagaattcttagctctggccaagtgtccaggcagcttcagaagtgaccacaggccagccacatgggccaggccagagtggtggaaaacatccatttgcaccgaaatcggtattagtttgttctggctgctataacaaagtaccacaactgagtggcttcagcaacagaaattgatcatctcacagttctggaggccagagtccaagatcaaggtgttgccagggttggttccttctgggggccataagggagaagctgctccaggcctctcccccagcttctggtggttgctggcaatctttgttatttcttggcttgaaggagcatcaccccatctctggcttcattcattcactcaccttctcatctcaccagtgctctcccaggcccttgttcggagcctccacagacccacactcctgtttctcacgcagtaatgttctaagcccccaggagactaagaacttaatacctggattctcacactcatctccctcagcaccacagctctgacaaccacccccaggaggtgacagcaaagaaaggaaggagcaactgctcccccagaacccttctatactcccccgggctgctctcagcagctgtgtgcccaactcagtgctgtgaggtggaacggggagatggagacacacacacacacacaccagagagtttataaaatgtgcacacggaaacacttcctaaagaaagaagtggagttctcaagtcactatgggactacggaactcggcatctgagcatccccttctgtataatggggttggctgggcagtcccttccagctctggcttcctctcagaccaggattataggatcctgaaaagccagtgcttccctcagggagtggaaggttctggggctcagcagggggcccggagccattgtggagggctttcaaggtgaggacaatagaagagcaggtcttgcgtggcttggacagggaaagaggagaaggagtgggcatttgaggcagggggtgtagcatgagccaggcttgagggccagaaattggggtgaactctgatgggggctgggtagagaagcttctacaggccccagctcaagagaccccatctctcctcctctctgtcacttgccatgctggatccgtgcatgatcacactcctggactcgcctccttgccctgagatccagacccccgtattcagctgccccctcagctcctccactcacatatttaatgccagactcttcatgtctatctacacctgcacttttgcacccaatccaactccccgccatgtcccccatctcaggtaatgtcagctcggtccttccagctgctcaagctaaaacccatgtcactttgactctccctcttgcccactacatccaagctgctagcactgctcctgatccagcttcagattaagtctcagaatctacccacttctcgccttctccactgccaccagcccattctgtgccagcatcatcacttgccaggactgttacaatagcctcctcactagccccactcacagcagccagatgaatcttttgagtccatgcctagtcactggggcaaaataggactccgaggagaaagtccgagaccagctccggcaagatgagcaaacacagcctgtgcagggtgcagggagggctagaggcctgaggcttgaaacagctctcaagtggagggggaaacaaccattgccctcatagaggacacatccacaccagggctgtgctagcgtgggcaggcaagccaggtgctggacctctgcacgtggggcatgtgtgggtatgtacatgtacctgtgttcttggtgtgtgtgtgtgtgtgtgtgtgtgtgtgtgtctagagctggggtgcaactatggggcccctcgggacatgtcccagccaatgcctgctttgaccagaggagtgtccacgtggctcaggtggtcgagtatctcataccgccctagcacacgtgtgactcctttcccctattgtctacgcagcctgcccttggacaaggacccgatgcccaaccccaggcctggcaagccctcggccccttccttggcccttggcccatccccaggagcctcgcccagctggagggctgcacccaaagcctcagacctgctgggggcccggggcccagggggaaccttccagggccgagatcttcgaggcggggcccatgcctcctcttcttccttgaaccccatgccaccatcgcagctgcaggtgaggccctgggcccaggatggggcaggcagggtggggtacctggacctacaggtgccgacctttactgtggcactgggcgggaggggggctggctggggcacaggaagtggtttctgggtcccaggcaagtctgtgacttatgcagatgttgcagggccaagaaaatccccacctgccaggcctcagagattggaggctctccccgacctcccaatccctgtctcaggagaggaggaggccgtattgtagtcccatgagcatagctatgtgtccccatccccatgtgacaagagaagaggactggggccaagtaggtgaggtgacagggctgaggccagctctgcaacttattagctgtttgatctttaaaaagttactcgatctccatgagcctcagtttccatacgtgtaaaagggggatgatcatagcatctaccatgtgggcttgcagtgcagagtatttgaattagacacagaacagtgaggatcaggatggcctctcacccacctgcctttctgcccagctgcccacactgcccctagtcatggtggcaccctccggggcacggctgggccccttgccccacttacaggcactcctccaggacaggccacatttcatgcaccaggtatggacggtgaatgggcagggaggagggagcaggtgggagaactgtggggaggggccccgagtcaggctgaaccacagcccacatgtgccccccagctctcaacggtggatgcccacgcccggacccctgtgctgcaggtgcaccccctggagagcccagccatgatcagcctcacaccacccaccaccgccactggggtcttctccctcaaggcccggcctggcctcccacctggtaacacctcagcccgtaccccatggcttcacagaacccccaagtccccagatccttggctgtgagcagtgtaggctattctgaattgcagtactctgggggtcaaaggtgtcaggtctcagaggcttggaaactccaccctccaaaaaacgtcaggtgcagaaccttaaagatgcagaatgtcaaaatcacaaaaccacagagctttacaaagctagtcaaaatgtcagcacctgcgaatggccgtctttaagcttctctgccagaagcctgggactttggggacagcagagccccctgggagtcagggttttcgaggctcaggagggtgggaagctcaaaatgagaggccttgtgggccaagctccagagcccagcccacagcctccataggtgccctgtccccacccacagggatcaacgtggccagcctggaatgggtgtccagggagccggcactgctctgcaccttcccaaatcccagtgcacccaggaaggacaggtcagtggacagggctgggaaggatcctcgccctcctatcccctcccctgacaccctctgtccccccagcaccctttcggctgtgccccagagctcctacccactgctggcaaatggtgtctgcaagtggcccggatgtgagaaggtcttcgaagagccagaggacttcctcaagtgagtggcccaggcctgtgccagtctaccggccctggcttgtggggagaggtctagggtgcagatctcagctcaggcttcatcccaataagtagtaagatgcaagagctaaactctgagactgtgggttcaaatcccagctccatccctgactggctgtgtgaccttggacaaattacttagcttctctcgacctcagttttctcgtatgtataataagaaacgtttgtgctgttatttacccccattttacagacaaggagactgaggccaaagaggttaagtgtcttgatcaaaatctcccagttcctgagtgacagagctgggatttgaacccatgtagccaggctctagaatctgcactcctgctttgccctgctactcctcatgccaacatgccagccttattccactgttcccaaagttctagctcctctagatggctgctgctgcctcccctcagtccccccatatgtctctctctctctctctctctctctctctctctctctctctctctctctctttctctctctctcacacacacacacacacaaatacacaccacactacacacaacccttagcagcaaccccacatgtcctgtcctccttgcagccaggcctttgcacaggccgtccctccacccagaatgctttgcccactctcacctccctggcccattctcaactcaccacacttccaacattatctccagcactctggccaggctcaagtggtgagttcaggcctgacatgcagtaggtgctgaggggcatgtgttaagggaacgaggggtgtgagagggagactgaggtagagaggggaggggagctggggctcagaggagagaactcccagagggtctgggccctccccattcagagcattgagccagaccaggcctgtcgtggtcacctgcatggaatcttctccctacttaggcactgccaggcggaccatcttctggatgagaagggcagggcacaatgtctcctccagagagagatggtacagtctctggagcagcaggtaatgccagggcggtggagggtaagggatagggatagtgcgcaaaaccttctgtccaccatgtgccagaaaccaagttcacctgggacgagggctggtataaaggaaggaagaggagcgggcactcccagggaagaccgtagcctgggcaaagatgtggcagagaagggccaggctgaggcctcatgtttgtgccatttcacagctggtgctggagaaggagaagctgagtgccatgcaggcccacctggctgggaaaatggcactgaccaaggcttcatctgtggtgagcgaccccaggactggtggtggcagactcagactgctggggggcagggaggaggtctgcacggtgcagggaacctaacctcacattcaggtcctgagagctaggggcccctgtccccagctccaaacatgcccagacctggaaatctgtccccttctacttacaaaccctctgaccccggctgggcgtggtggctcacgcctgtaatcccagcactttgggaggccgaggcgggtggatcacgaggtcaggagttcaagaccagcctcgccaagatggtgaaaccctgtgtctactaaaagtacaaaaaattagccaggcgtggtggcaggtgtctgtagtcccaactacttgggaggctgaggcagagaattgcttgaacctgggaggcggagtttgcagtgagctgagatcataccactgcactccagcctaggcgacagatcaagactccgtctcaagaaaaaaaaaaaaaaaaaaccctctgactctaagatccccaaacactgtgatcctgagttgttaaagcaaatgcaaatagccagacttgccagatgcaggctgtgtgccagcaggaccagctatgtaacctgcagggccccttgttcagatttcaagatggcgaccacagagcattaaacaaagcacagggtgccacataaccacataggtcacacgcccatgaagccagccctggaggccaggcactgtttctgagcgctttgctggtggtaatttatttctcatgatgcgaatgtacagatgaggaatattgaggccaggggggtttaggtgactttcccaaggtcacagttgggtggtaaagagccctattcaaccccagttcatggtcccagcatcagtggccacatacgacatccgcacctgtgctctaataaatacggctcatgctgttttgtgggattccacctcagactggaatttagaagagggcgtccttgctttgaaaaacactgatttaaaaataaagtggagccaggcgcagtggctcatgcctgtaatcccagcactttgggaggctgaagcgggtggatcacatgaggtcaggagttcgagaccagcctggctaacatggtgaaaccccatctctaccaaaaatacaaaaattagctgggcgtagtgacgggcacctgtagtcccagctactcgggaggctgaggcagaagacttgcttgaatctgggaggtgggggttgcagtgagccgagattgcaccactgcactccagcctgggcgacagagcaagactcagtatcaaaaaaaataaaaaacataaaatagaaagtaaaaagtgggaagtttaagcctctgggtcaccagcctctccccctcacccaggcatcatccgacaagggctcctgctgcatcgtagctgctggcagccaaggccctgtcgtcccagcctggtctggcccccgggaggcccctgacagcctgtttgctgtccggaggcacctgtggggtagccatggaaacagcacattcccaggtaagaatggtccttgcactacacggtgcccccaagctcctaatcctgacaggctctgggtggagggtgcaaaggagctccatgctgccccttcccaccaccaccaccactgcagctgccgccactcagcctttgggaaaatgcatccgctcacaaaagcttcctttcgggatgtccgtggcctgaaagccccccatatggtctcgagtgtcgggcccctagccctgactcccttggggattggggccatgcctcacccactctggactccagctactatattcggccatcagaagggagggaccctgctaagtaattccaggagcacctcctttcctcccctgaccaaggaaaatcggggtggattcgcccgagctcacctatccactgctctccaccaggcctggcctgtgggcttagcagggatcagagaccttgactgtcatcctggctctgccatttaacctcttgcatcctttggtgtgcaagttactccgcttcttttcaacctcggggagaactattttggcagaagtggtgcaaagaataaatgatacaacttatgtcaggtgctcagcaaacagtacctgtgcccgtggacacgggtgttgacggtgagatctcaggcctgtagactcaccttgtagggggaggggacagggagctagctaggaggtcctgcatggggcttgattcatccccaccctctgacagagttcctccacaacatggactacttcaagttccacaacatgcgaccccctttcacctacgccacgctcatccgctgggtaagcagggcagctcggccccaaggaggaggaagacaaagatggggtgggggacctgcctcccaaactcctgtctccctctgagtgccctcagagtgggttcctccattcccaagccccagccccaaggatccccaagccgtgcctcaaatgtgacccctcatgctggcttcaccccaaacctgtccgcaaatccaaacctaaaccaccatccaggccagagcatgccaaattctgaccctaaacctacccctttccagatgtccacctcagccccatacctaaccctctcctggacccataaaatagcctaaagctaaccccatctctgcaccttgccctaaacgtaccccagctcttactctaactccttccccagcctttatgccaacccaaccccatctccttccctggccccaacgtaccccagtatgtcaatacacccccaactgggcaccattcccaacctttccttgtaacacccatttgatccttaacttcatcaccccatcccaactccttcatctcagcctccccaatgccttctcagaaccttcatcctagcgccacacctaaccccaaacctgaacctcacccctacatgataccagatattccccgactgtctctgaactgaaaccctgacctagccccatcctgactgatagcctcactgcaatcatcatcgctgactctgtaatcccattcctgaatccaaactgatcaaattccctgaccctcagcctcactccacaccgaaccccacaactaacctcatccttgccctgagcctaaccacctaaccatgtccctgacacgtaagatactcgataattcaaaccatctctggcttctgacctaaagccaagtcatcccatccctcacccctagaccccccacctgagtccaccccagcctgactcttaacccaccccttccctgacccttaagttggcctggccctttaccccttccaaatccttgaccccacttctgacccttcaccttccccaaccctgaaatgtcacctccacagagaaccccaactccaactccatcccagacctttcacctcacttcagccctagccctgaacaagaccccactcccaacctcagtcctgatcccttacctaatcccagaacaaccatacccacacccatctaaccctgcccaacccgacacttcaccccttttctaaccccatctttgaccccatgcttcaccccacatctagtcctgtccctgattacctgcccctacaattccgcccccatgtcagatggctcggggtaggtcatagcccctctaaaccccaagtttggggaatgtgccccttaccccaccccccaacttccaggccatcctggaggctccagagaagcagcggacactcaatgagatctaccactggttcacacgcatgtttgccttcttcagaaaccatcctgccacctggaaggtgagctcctctgaggtggcggtgactgggatggcctcaagtgccatcgcagctcaaagtgggcaggcctgggtctgggctcataggcacattggggaggaacgggatgtgggttgttggtggtggctgctggcctcagaggttgacgcccacctgctccctgtccccggccttccacagaacgccatccgccacaacctgagtctgcacaagtgctttgtgcgggtggagagcgagaagggggctgtgtggaccgtggatgagctggagttccgcaagaaacggagccagaggcccagcaggtgttccaaccctacacctggcccctgacctcaagatcaaggaaaggaggatggacgaacaggggccaaactggtgggaggcagaggtggtgggggcagggatgataggccctggatgtgcccacagggaccaagaagtgaggtttccactgtcttgcctgccagggcccctgttcccccgctggcagccaccccctcccccatcatatcctttgccccaaggctgctcagaggggccccggtcctggccccagcccccacctccgccccagacacaccccccagtcgagccctgcagccaaacagagccttcacaaccagccacacagagcctgcctcagctgctcgcacagattacttcagggctggaaaagtcacacagacacacaaaatgtcacaatcctgtccctcactcaacacaaaccccaaaacacagagagcctgcctcagtacactcaaacaacctcaaagctgcatcatcacacaatcacacacaagcacagccctgacaacccacacaccccaaggcacgcacccacagccagcctcagggcccacaggggcactgtcaacacaggggtgtgcccagaggcctacacagaagcagcgtcagtaccctcaggatctgaggtcccaacacgtgctcgctcacacacacggcctgttagaattcacctgtgtatctcacgcatatgcacacgcacagccccccagtgggtctcttgagtcccgtgcagacacacacagccacacacactgccttgccaaaaataccccgtgtctcccctgccactcacctcactcccattccctgagccctgatccatgcctcagcttagactgcagaggaactactcatttatttgggatccaaggcccccaacccacagtaccgtccccaataaactgcagccgagctccccaca

SEQ ID NO: 51 - DNA, 23620 bp, Homo sapiens
gggaagccagacggttaacacagacaaagtgctgccgtgacactcggccctccagtgttgcggagaggcaagagcagcgaccgcggcacctgtccgcccggagctgggacgcgggcgcccgggcggccggacgaagcgaggagggaccgccgaggtgcgcgtctgtgcggctcagcctggcgggggacgcggggagaatgtggactgggtagagatgaacgagacttttctcagatgttggatatttgcttggaaaaacgtgtgggtacgaccttggtaaggaacttgaattttttttttttaattctgaaattgatctgaaaactttattttcttttcctttattgttattattattaattttttttggctaatgtcgcagtagaaacatgcttctgctttagtgcacttagtgctgtcaaacatttgtgagactttccttatgaatcattaaccctttcagttctagacataattgccaattcattgaaatttcagtagtggttccagctcacactcgtcaaactattccgggttggctgaagttttctattttattttatttttaacatgtgtttggcgtcatgactctacatgttggaactaaataaaaataagcaggtttgcttaaatcataactgagggaaaaacaactttgcatccaacttttttttttttaagagcatcctatttagagaagtggaagaatgtaaaaacctccttgaaggacttccacagaatgttatgtttacatttgaacaaacacacattcttacatggaaatgatacccatattcctcatttttatcaaacatgtctatatgagaaaacccttacagaagttgtttacctttttttgcctttggaaaacagtttttttctgagtgtgagggaggattttgggggaatatcctcatcaatgtacaagtggaagcagagcttgtcctccaagtcttctaaatttgttataactttagttacagtaaactgtagtacatcagtgacttctgggaattcatacactttcagatttaaatggaaagtgctatttgtagctgaggactcctaaaggaattctctccagggaattttattaaacggttttatgttttgtttttgccttttcaatttggtatgagatgcttgcaagtcagaagacactgcaggctgttttccccttcacccatttttcctcctcttttcctgtggtccaagtgatttctaagaggccgtagctcagtgatgctggcaggatgcaacccttttcagtcttccatgtgagaggatgaaagagagctcgcagcagagggaggaggcagttgttttgaaagttgttttgcgttgggagctggtgggaaagttcggtcttccccatttggaaaaggcaggctgggttccgctcctgcaccacacgcgctttccatttttagcttcattcagaggcagacagagctccttcctcttcctctccttgtttgtgacacttttctgaggcagcttttccacagtgccgagggtctggcggccatgaccccaggcattctgggacactggactgtgtgcccagaacatttttctgccatgagaggtaaagccagggattgttcagaggtgattctttttttttttttccttttccccacagtgaggttgccacattcttttttttttttttttttttaactaagagtagcatttaaaaaccttgcttcttttcaaggcagtttactttatacggcttcttggctctttctcaactgtaccaagcactctgcatctgcttttaaagtcttcagactactgtattagtcatagcctctcagaaggagccacaggaacggcgggacaatggggattaaaggcctttcctttctcttccaggctgcccccaagtgtaactccagcactgtgaggtttcagggattggcagaggggaccaaggggaccatgaaaatggacatggaggatgcggatatgactctgtggacagaggctgagtttgaagagaagtgtacatacattgtgaacgaccacccctgggattctggtgctgatggcggtacttcggttcaggcggaggcatccttaccaaggaatctgcttttcaagtatgccaccaacagtgaagaggtaagcctctggtttattgacaagaagattggggacctggtgccaaatctccctacttgcccttgaggccttgtatatctctgaaaacctctgagaatctgtaagtatcagtaaataattgattgctctattcaattcttgcattgctttctctttccctaaaccatttccttctcatttcttccagccttcaactgttcctcactaattagtaaacagttaaatattttggcaaattggcatgtcttagaaaagcaacttgcagcatagggtgggtgaaattgtcagtgaacttcaagaaagctctgggcccactggccctagtgtccctgttgtacaatatctcttaagggagaaaactttttcttggaaaaaaaagttttaatatttcttttgtctgtctttggtaattagttggctttactctttttaacaagccagctttattagctgggtttctaaaactatcctcaaaactttgacgtgtttatgaagtgaagtgatggtataagccgagaaagggggtcatgtaaaagtgtcctctgtctggatgacttcagagctaaccactgtttatctgcagcagctcctttgctggggctgggctggcaggccaattccttactggcctctgaagtgggtacactctttgttgtttcaaaggggatgaaaacccaaacttggaatgagcaactgatttgtgtttacctttaatataaagattatagctaggcgtgatgtttagctgtgaaataacttgcagaaccacctcttgttttcagaatttggcttactgtagttgcacttactagtctactactgggttgagttgaatgaaaggacccctcagcagacttcccataccaccattagcacagagcactgtcaattctattacttccttcagaaagtagggaaaggggatggttggccgtagaaatccagaatttgctactgggactattccttacagccgtgtcaaatcactttcccccttccctaaggaacagtatttgaaggaatccgggagactaggaaatgctttgtctctttcctgtttgtgtgtctgagtccagtgtttttggtgagggggagacacagctgtctaaaattaaatagaacaacgatgctcagtctttcttttttcccccactgctgcgtgaatggaggcagattttataaaaaataaaatttaaattctagttgtagttgaatgttaccaaaaaatttaaccccagaggtcagccttaattatacctcttcctgaaagtaatgctcttcttatagaaagtctctcaatatgtggcccttggaatgaatgtaggatttgtttgggtatatgaggtttgactatggctttaaaaagtgtagtgtgttttttccccatatcaagtttgaccaaatattcgtctgttcccaagcttcgtttgtgctgtgttgccctgtccagtcctttgggactgaagtaaaaatctccattctgtgggtcatctttgccttttaattctataatgttcttatcgtcagttcagctcttagcttaagtttttcaatttccgtcattctcctttaaaatcatagctaagtcaagtaatgctcttagatcatttagttcaaggttcagaaagacagtcacttacccaaaggcatataggtaaagccagaccggggacttgaagcaaagcttttctgacttctccaatgagtgcttctcgattatgctacactggcccctcttggtgtcactgtggttttagttatcatcttaatatatttcagaccaatccttaagctattttgtgtttttttccctctgaatgtataacttcctatttcaatatattaagcaaccaaaaaacagacaatgcctgtgttcctgaagaaggtccttcgaaactaacctaagaggtgagggttctcttatcctatttccctatcttgcatttaactgaagcgcttgaatagaggatagtatgtctttaaaccctaatcataaagtcaagcaaggagtaaacttgaatgtaatactgtcttaagcttactctggaatttgtacctgtttttctgtttctctcctttgtttttgaactttgggaaaggacagcttcctttagaaggtgaaagaggatggtggagttgagccattaagggtaggatagctgcaaactagttccgggacagcaacattaaggattgatgaaatgtttacattatctttattcagttagttctttaagttccatgagccattgaaataggaagagtctttctacatgtactttttatctgacttattaatcttgcccttctttaaatgttttcgtttaaatagcaaaagatgttacaatatgtactattgtgctgacataccggggaattttttttttacaagaccatttttcattatgaatttgtaccatgtgtcagcaccttttttttttttttggttaaaacaaaacatacaaatcatatttctgatcttgaccctcatttttagattgggtttagaatcattctgcacctttaatgaaaaactgttcttacttcctatttccagaactgaaatcaaatatagacctactattcaaaactttgaaaatgttttaaactgatgggttattcttttatgggggttttccccttgtcctcctgaaataatctcttatgactacttgactacagaaaaatcagttcaagcatttatattttagaagcgttaccctgtagagtttctgccgtcggttgagactgcttgcactcaagaggcactgtggctctgtgagtctcacctccctgtatcgtggctgataaacatcagacagattgtgaggactcctttggtgtccattctgatcgaaatccattattaactcaagccatctgtaaaaagtatctcaccataacatgcaattctctcttcatgttgccttttatttgagaaatgatgtaccaaggcatcaccatgtctcctttaatagaaagataatgaagaaggaaaccttctccaaacaactttgttcacttcactccttttaaaaatggggtgattgccgggcgcggtggctcacgcctgtaatcccagcactttgggaggctgaggacagcagatcacctgaggtcaggagttcaagaccagcctagccaacatggtgaaaccccatctctactaaaaatacaaaaattagccgggcgtggtggtgggcgcctgtaatcccagctacctgagaggctgaggtaggagaatcgcttgaacctgggaggtggagtgagccgagatcgtgccattgcactccagcccaggcaacgagagtgaaactctgtttcaaaataaataagtaaataaatgccattgcactccagcccaggcaacaagagcaaaaccctgtttctaaataaataaaataaaataaaaatgaggtgattgcaggctgaaggtcttggtcactactgagttctagttctctcaagacaaatattcatatggtcaaaacagaattataatctaacgagtcattcttatagagtgggattcggggagggaaaacagatagctagtaatttaaatgatcttaatgtaatttggggagaggatgatcagatgacatttagacttggatatagtttctgcttcaaacccacgctgtgtgtgtctgtttgcatactctctaaagaaggaatttgaaaaaaaaaaaaaaaaacaaacctatattgtccttgttatcagccttccattaagcgctccaactcaacccatcctaagctgtcaaatctccttcattgtgtaaaattgaaaagaagccctgtgttttgtccggaagctgtggaaactgtggacggcggggtgtgttctgtaactgaggccacagacagaaacaaatctgctcaagtggtggaggggtctgcaccgcacataaagagcttctgtgggagcaggtgaagcaaggaggtattgaagccgggtgtcctcttgctgttgagtttatagaaggcacagagcggcctgtccccagcagtaattctttaggaccctggtcagttccagtgaagtttccttcttgagttaggtgaacacattctttgtctttttagcactgtgaagtttaagctacacaccaagttcctccttagtatttgcttggttcaaagataaactgttacaaactatgggtcagggagatgggtagtctaagatgcacattctggatctttctaggaccagagggagacttagtacttggttttttcacttccctttaaaaacaatcctggttcctgttccccctccaaagttacctggacaagcaccatagtcttagagtttcagcttttatggcgtctgtgtctcagacgtgcatttgagatgaagatgtttactgtatattagaacgctagacttagaatggatataggtggtttgtaagtgccttccagttttgaaattttatgattttgtatctttatctataggtgtgagtttatatgtgccctatagcactgtatgtaattgaaatttaaaatattagggcgctctgtccctttcctaatgataagctaatattgaagctctttaatttgtctggggtttgaggattatcatagacctctcttctaccacagagccttctctttttaattgttctcctgtcttgcctgttgaattgaatttgtaaggttagagatggcaagagctacttccggtgctgctttatagcttactagtgatgagtctatagttgtgctcaaataggtattgggtagcttatgctttctagttgacttctttttgggcacaagaaaatgtgtgtaagatggataactgaaaacctagaggcccattctgtaaaagaatggcaatttggaagaagaaccacgacctcagtgcagtgctccgttttggtaatcaagctctgactcccaagacaccatctgtaagagactataatttaaaacaaagttgatgaaccagttgagtgcctttcttaaaattactgttgtaaagtagatatgttgaaaatatcaactgctaattattggctcaccaacaaatggcatgatttgtttttcctgtttgtcattctaatattatggaataatcactgaaatatgaatgttaaatgatttgcatgtcatagaattcaattccattaattttccaaattaattagattcaataataatatgtccaaaacaatgagcctctgaataagtctactaaagctttaaatatatatatttatatctcaagactgctctgagatactcttgtccccagtagttttactgccaacaaataccaataatgacaaacggtgattaaaagggcagatagatgtaaatgaaggcagaggaggaggatgaaatgaacatctgcttttttcagctctctgacagaaattcttaaaggaccaaaaataacactcttgtttcaacttatgttaggtgtaggaaaattttctttttttctctttccagtctgagtatgcttcattgatttgtatattgaatactaaattgttttagaaaaaaaaatcattggctgataagacacttaaatgagaaaagctagtctgtcacaggcatgtaggtgtgccatatctatttaaatagaggtttaaattattgatgagacttaatgaggaactggtgtatattgtaaccaaaattgtagattccactgtgaacaatctgtgcatggatcgattcacatatttgagtctaccatttcaggtacatgaatgtacaggagctactgggaatataaaaactggaaaataaacattatcatctattaccactccctcctccttggtccattttagtaaagaattcagtaaagtgataggtaggctatcttgaatgagaagaaaataaaactaggaaagtgagagaataaaaaccaaaacaaaactgtaactgcaaactgttgtaaaggactactcacagaggagttctattgaatagtgacgaattgcttcctgattcacggttggtgatttttttaccccttcaaagagaaatttattattaaggaggaactggtatagttaacatgtttctttagcaaggccccacaaagttaaaatgtgtgatgcatccagtctgaggtcatttcctcagatcttagaacctacagctttcctccgtataaacttaatttcaaaggagggcttttggccaggcatggtggctcagcctgtaatctcagcactttgggaggccgaggtgggaggatcgcttgagtccaggagtttgagacaaggctgggcaacatggtgagaccccttctcaacaataacaacaaaaattagctgggcgtgatggtgcatgcctgtagtcccagctactcaggaggctgaggtgggaggatctcttgatcccaggaggtcaaggctgcaatgagctaagatcaagccactgcattccagcctgagtgatagtgggagaccttgtctttaaaacacacacacacacacacacacacacgagggcctttgaccactcttgagtagaagactcgagaagaacaaagtagaaggccagagaagaacaaagttacttgaaagatctcttattaaagagaatgtacaagctatgaaaaaaaaaaaacacacacacacacacaaacctcatctggaatgaaaaaaacataatgcatttggtttctggttccttaggctgttatggaacaaccaaagaacattattttggtttctgaggtcagaactattttattcccctcaagcacactatgcttatggtttgagggagaatgagaaataggaaactaggaacaggctgaaatggtctaatcttgaccatctaattctgcagtgtcttattctcattctaaaagagaatggttatattcgctgttctagcataaaaagtaatgataaaaataaaagatcccgtattaccagacaataatcccctagactgttttaatgcttggttgagtatttgcttatgatctcagactttaaaagatggtctccccctatggtgaagcttgttaattatgtaggcatcattaatgtctgtttacttatcaaaattttatcattgttagttgtattactacttgacagtccaatttatttaattgaaaagattggttaacattttatagtcaaagtaattgtttcctgtgttttttcctgtttaggttattggagtgatgagtaaagaatacataccaaagggcacacgttttggacccctaataggtgaaatctacaccaatgacacagttcctaagaacgccaacaggaaatatttttggagggtaagtaagggaaatttcttcagacccattaaatgttaggaaaaaatggagctaaaagagctgggtggctcacctttctcatcctgtgctgagaaatgctggggctcacccataagtatccagcatccccatggacacagggaattctgaacaaatgtgatgaaaccgatgaaatgtctggcctgtaggtggttagtgatggagatacgggctatatgtgaatcttgatttttgcaattcattagagctttgtaatgaaaggaaacagtttgttgcttgctttaaggataggttcatttgcatttctccgcaaggaagtagtaatgagttaccaagccttagatttcacccctttttgatttcttgctgacttaactttaattgaatggaagagttatcacaaatgaattatctttttggtttttttttttttgagatggagtctcactctgtcaccaggctggagtgcaatggcatgatctcggctcactgcaacctccgcctcccaggttcaagcaattgtcctgcctcagcctcccgagtagctgggactaaggtgcgcgccaccatgcccagttaatttttgtatttttagtagagacggggttccactatgttggccatgatggtctcgatctctggacctcgtgatccgcccaccttggcctcccaaagtgctggaattacaggcaagagccaccgcgcccagccaggaatgacaaatgaattaccttataagtaaatgccattaaggaaggatagctggaagatgggttgaggggaatggaggaccacagaactagtcctatttaaatacatgtgcatggtaaaatgattccatttgacaataggttaattatctcatagcataaggaaaatgcttaacagtcatatgcaagatgataagctttcctatagcatccaaccaaaagatctagccagtacaatttcctttgctatattagggttagaaaggcccccagaggtgaaccaattagatggaatccttgaataaaacactggattagcagtgaacagaaaaaagtcagattgctttccttcttcccatagatgtctcagggatatttagtttcctcagaagataaagaatttagtaagcgtttttttgtgcatacttacatgaaatgtacattatttgaattctttaaaaagaaacagctgcatgataacaaaaattgtgttatgcttgctttagctggtatttttgcctagaacgattatatcgttcggacaagaagctattcctaagaaacaatatttttaatccaggaagtttttcatttttagaaatttatcttactatttcccaagcaaaagagggtagttacagattcactaagaatcatgtgctcacaatttttatttaataattattcctccttaaaatatattaatcacctgacttacaatggtggaaccatgagtgcatttttgcctttattgtcaataacgtcttctcagaagtgagccacaaaggtgcatagttcttggagttaaaggtctgaattaagacaatccagcataagtctcattaatgtgtgattattttgagaaaaggcaagaagtacctaagaatctccccctcactgtccagttccctgtttcatttaaagattcactgtaagtaactgaaaggctttccttgggaggatttatttgaatcagtctttcacatgcaaaggatattgtagaacatctcgtttttgctggcaggaatatgaacatctgttgtgaggaaagaaaaagtttcatgcaaattacactgccaaagaagggatgttcaagttgagaaaccagtgacatttcttgtaactgtactatgaatcagcgcattttaatcttctagataatatatggaagtgcaggaaggtggtaggaaacggtgttcattttacatatgcgttattttattctgtgtgagtgacttcatggcaccgacattgctgtttttaaatgaggatacagtaaattgcagtccgaggaaggctaactggaatcaacatacccgtagctttagaaagcagtttccgcaccagcgaagagtacaagagcgatggaaccccatgttcctggaagtttgcacatcagagtaaacaaacttgaaaacccctcttgatagcagaattcacccagccttgttccattttctcttaacaaaacacaccgcaaaagctctcacaagctgctttgatgaagccacatgtatttcccccttcacaatttacaggaagttactcttaaaagaaagtgattctggtgtttaccgcctgtgttaaagggacagagttcctttttatttctgataacgtttgagcgaaatacagaaactatctgtagactagcatagtcggtacgtgagtaaggaaaagcaataacctgctgtccggtgagcacaaaattcctgctacgaacagtgccttactgctgcttggagactgcaagtcgcagatcacactaggtattgactgattgtataaggaaatttcttaaagtctaaagtaaaggtggtacctcctaaaaagaggggaagagagaaaactttgtgtggaaggataaggagtgtgtttatagtttcagtaagagtgtacgttttaatttttcttcttcctctgcctctttgccaagtagcctgagtgcatctgttatccagaagtagtattactctaggacaaacttcaaattcttcattctgcgttgcctttaaggaacaacatactttcttcctgttctttttccaaaaacacacgcctatggctctgtgtgtggtgttttagccagcctcctcccagataaggggttcccttccctcctttgcattgaaaggaaagtgcaagtctggacatgtttatcaagaggaaaagtgacttctcagtaatagactgtcaaattcgggctgctgcccgagtgttcgctttgttatggcaggtgaagttcacctttgccccacccagtgtttccacaaaaaggcaaggttccaagtattcatatgaacaagtgttactttaggacttggagggttgggggtggaggatgtttgcatagttgaagccttgggcgggggtgtaggaaacggcgagtacagaggccatagaaaaagctaagactcagtttgacgtcgtcagccggcttggtcttctacccagtgactcaaagcactaaaagtcagcataatcggaactgaagtcagtagcatcgcccatttgccattcactgcagtagcaaaagtagtactctgtggtgggttaatcggtttgaggcagctccttaaatgaacatttgtgtttcatttttctgttattttcccgaacatgaaaagacgataaaactgaaatggaaaaggtaactgacaaaagtgtgccttacctgtttccgccctgatttctgctgattcaagactattctggctaaactgattggattctttttctaactaggcagtaggggatcagaaatcacacacggtaccggctgtgtttattctgagaggtgctggggagctttgggtctgacttccttttacatgcctgtcttctcttttggacagatctattccagaggggagcttcaccacttcattgacggctttaatgaagagaaaagcaactggatgcgctatgtgaatccagcacactctccccgggagcaaaacctggctgcgtgtcagaacgggatgaacatctacttctacaccattaagcccatccctgccaaccaggaacttcttgtgtggtattgtcgggactttgcagaaaggcttcactacccttatcccggagagctgacaatgatgaatctcagtaagtggattacagaacaaaaaaataaaaaatgccagtaatgtcggttctgcccctttgaactaataacatgttgtttaattatacggctttgtcatgtgttggatgaagtaggtggcttaagctagggactaggaagaggaaaaacattttttgagtccctattaactattaggaaacttgatcatttaaaagtatatatatatatgaggagctaccttgagttttgaattcaggatgttacaggaagaaatatatgtccaattctaatttatccaaaagcagttgggagaattacagggattggtccagacatgctgcgtatgcaaggtatagccctcatctgtggtactttggcagggcttagactgcatcaaaatatttatagatgtacatttgagtgtacagttaggatctgatgtggaacattgtaagatcattgctagaaaaactttgtcataatttttcaatattattctaagtgaataaccgtaaagattttacatcttagcttccttccttacagtaaaaaaactatctgatctcttgatcagtattatagtagccacctatcactttatcttaacaaattctcaattccttaggtttatgtgcttttacttcttttatttgattaaaattgctgtcatgacctctctctgcagagggctgcatcattttggtcattctcaagtgatctctttgagcaatttaagaattgccataagattctaacctctgctgtaactatggttgtgtgttcttggttagaccactaaatcttattagcagttttaaaaattattccttttggtttagaagttaagactaaatgctgaagtttttgtaacttttggttttgatatcatttcaaacttaagaaaacatttgaagaaaaggacaaagaatttccacttaccctttacccaggtttaccagttattgataagtatatccatttgctttaccagaaggctaacttgttttagttctcattttcacctttgagacatttggaataaatatcaatgttaacataaattggaattttgactttgattttaggaccaatgaacaagccaagtacttaccctagtcatatataatccaactgtatggttatttggtattcattccacacttcattttacttgatctcccttaagattgcaagattgtgtttgcagtttttctgaaaatctggggctataaaagcatcaggacctcccccgtaggggaggtcgtgtgtttggggtccttacacaacaggttacccttgagcttcaggaaaagaactggctctcagttccccagttccagcttaatgggtctaattaggtcctgaccaaaaaggtggcagttcttttccctcatgtctcttcagcgctccccgagactctggagactctgtcatatccctagggctgagcctcccaggaaccattcggctgttgtggcatctgtgtatgccatgcccagtgctgaggacctagtaacaaacgacaaatgcacaggcacagtggcatttttgtggaactcgtattccagctgtgcgtctcagaagaagcgcacagctccctcctggctttcttaacatagtgagccacttccacttaagggtctccttacattccttgagtttaatcattcatggattcagaggaaagtcttttgatttttgcttttctttaaacagttcatttgaggtgacctaccccagtgactttgcaccaaccaccaagaaacttttttgcatgcttcccgcaccctgtgccaatcaagggaagggtttaaaggcctggcgtttttattcctcaaagaaaggttttgcacagtattttaaggttcaagtgcttctactttgtgttcagaagcaactgtcatatatactgtgaaatgacaccttttatttatccctttttatttatgcagtatgtccccttttattttggcagaattttttctaaatggtggtttaacattttcaagcacatttcattgtccaatattcatagtaaagaatgagagttaacaataaccagtcacattaaaacaagattcctgctgccagttgtgaaaccggttgtcttaggcgtggcagctgatgattgagactgtgatcaggaaaatttccactatttcatcaggcctaataggtagattgtgtctccaaatgaactgtgttgggtttccatgcttaaagcacaatagaggtggtgcaagaatctccatgagggcttaaatggcagtgatggttcaggcggtagagtttggagaagaagggatttgaaacaaaccaaaggaaagaaaagtaagtagccagaaatcacaaaatggcatttttctaaaaacaaaggaaaaggaataaaagaactaataagtttgaaacccctacccctcccaaatttggcagggggggaggtattttttttctatctatctaactaacccatctagaaaacagttgaccaaattatagacttctaaatgttaatctgctttctcagtttcagttgaaaagagactttgttttgcctactgcagaacttctaggttctttcttatagtcttggggttcttattatagatcgaaaatgtgagtcggcataattaagccattcggagtcttcagaagcagttcactcttgaaatgactccgtccgcctacagccatttaagatttcagaacaaaaacagatcttgattttctttttcatgttaactcaagctgttgctgagtgggagagtcagaaatgacaccagctccactgattactcagctgctgaaggatgattttttaaaatgcacctttactgtatatggacttcctaatttccacctgtagagcatcttagggaggctaacatgtcactctggatgttcttttagaataagatgcaaatctatttttctgaaggcattagagatagcaaacatttattgtgagtttactatatactaggcactgtgctaagtgttttgcatagaaagtttaaaattctggcttttttgttggcccaatcataagtttcatatcagttcaacattcaaattatattaaggtacttaagaagaatccctggctaaatgtgaggggcagtgccacagatggactgaaactttatgcttattgcacatttatgctattattatttgttgaattatagaaccaagggagtgtggaagccactggaaaaaatatgagacttagatacataatttgagtaaaaatggctcaaagtcatgagggtaaagttttttgtatttccattttattcgagcggcatcgtttttaaaaatcattatgaatttgaccctatatagatgtttccaaataattctttttcaccttcataaaattccttcctgtggctgtgagatgccttgcctatcagttttcaagcttagttgtctttctcatcctttaccattttagctttaaaaaacaaaagtgacaattagaacttcctgcctgctgggcctcactgaaagaccgatattggcctgataaggagatatttattttgttttagtggcttcagaaatccctctccctcagcaagctttccatcacggcccccccgtcagcatcttccctgatagcgttcttctctgtgtttattctggggcttcaggctcgcccaggaggaactgataaccgctggcaggagataacattctctaaggggctctcaaattggaatcgaatccctcaagccagtcagcctagagaatacatttaaagggttcagttctggagtttcacagagttcatttctagacctatcagatagcaagtgtggagttctttctcaactaaattcaagcagagacattttttagacgatgaaggatatttgcacaaaggcttcagcatgatcccccaaacctgctgcctctgaaggcatctccacacattgacagccaatgccttcagtgcgttcctagggcaggtgtcctggcttgagtgactgtcctccaataatcagagctcaaactaaacatcgtatgttttacttttggtttccaggcaaggctgagcagggaattttcagttttccctgcccagatgggtgttttttcctgaaggcatcatttattgtgtagcgaggagacagggctggctgtggcagggatagtctagaactgtcctcattgctgctgttcctaaatagtatctttaccaagtaataacgtgccgtctttgggaataagtgctttcctcttagcctgttctgttttcttgggtgcgctaagtaattgaactggctcaggaagtacctattgtggtttggcagaggtgactgtcacgccttgtgactccaggggccagcactgctgggatcctggctagaccagacagagccttggtgaagtgcttaggctgtctgcacatcgcgaggaaggtggtattcacttcgctaagctccttggcataggcagtttgaacagggctttatcaaattcgtattcaacaagagtagaagcgaaaattgatgactgtgtattacttgaaatgagtcttaatctttcacatttagttctcagggtatgctgatttcctttaggtaaaccatgaacatcagaaagacttttattaacctatgacagggtccccaccccagtatttttccactccattaaaatggaagttttttttttttttttcttttttgagacagagttttgctcttgttgcccagtctggagtgcaatggcacaatctcggctcaccacaacctccacctcccagattcaagcgattcttctgcctcagcctcccaagtagctgggattacaggtgtgcgccaccacgcccagctaattttgtatttttagtagagatggggtttctccatgttggtcaggctggtctcgaacttccgacctcaggtgatccgcccacctcggcctcccaaagtgctgggattacaggcaagagccactgcatccagcttaggctatcttactccagcctaaacagcaattttctatcataaggtctgtactaatgaaaacagaatcacccaaggctgctgtttgttctgtctgtgctgccattgtccgcattttgctgaggaggaaacggaactgcacttttgagtgagtggcccagagccttctagaatgagagtgcgttggaagccagatatgtggcgattgtgtcgccagctgttactcaggttttctcaagaaggaggagcaactttggcagttttgcttcagttctctctagccctctgtgtaatcgcccctttttctttatttcagcacaaacacagagcagtctaaagcaaccgagcactgagaaaaatgaactctgcccaaagaatgtcccaaagagagagtacagcgtgaaagaaatcctaaaattggactccaacccctccaaaggaaaggacctctaccgttctaacatttcacccctcacatcagaaaaggacctcgatgactttagaagacgtgggagccccgaaatgcccttctaccctcgggtcgtttaccccatccgggcccctctgccagaagactttttgaaagcttccctggcctacgggatcgagagacccacgtacatcactcgctcccccattccatcctccaccactccaagcccctctgcaagaagcagccccgaccaaagcctcaagagctccagccctcacagcagccctgggaatacggtgtcccctgtgggccccggctctcaagagcaccgggactcctacgcttacttgaacgcgtcctacggcacggaaggtttgggctcctaccctggctacgcacccctgccccacctcccgccagctttcatcccctcgtacaacgctcactaccccaagttcctcttgcccccctacggcatgaattgtaatggcctgagcgctgtgagcagcatgaatggcatcaacaactttggcctcttcccgaggctgtgccctgtctacagcaatctcctcggtgggggcagcctgccccaccccatgctcaaccccacttctctcccgagctcgctgccctcagatggagcccggaggttgctccagccggagcatcccagggaggtgcttgtcccggcgccccacagtgccttctcctttaccggggccgccgccagcatgaaggacaaggcctgtagccccacaagcgggtctcccacggcgggaacagccgccacggcagaacatgtggtgcagcccaaagctacctcagcagcgatggcagcccccagcagcgacgaagccatgaatctcattaaaaacaaaagaaacatgaccggctacaagacccttccctacccgctgaagaagcagaacggcaagatcaagtacgaatgcaacgtttgcgccaagactttcggccagctctccaatctgaaggtaggccttgagagagagcagtccaaggggctgtgagtgcatgcttgtgtttgtatttagcttgctttccatggggtatcgattgcatttgcagtagtatgagcccccggttggggatagtgggtatggattccgcctggcttttgccacttctagctctttgactttggacaagtgacttcccttctcctgattttcttctgaataataaaaaaattaggggtttggactagaagattaggtgaaactccctgctagcctgtgatttttgtgcttttaagaaaaacaccattctgaaaacatgaagatttcttctttttaagactgtcttgatgcttttcttaagatatttgcatcaacacttgagtcttggagcagaaatgttaggtctcagagccagcttgagagcagagctaacacatgtggcttcttcccaggtccacctgagagtgcacagtggagaacggcctttcaaatgtcagacttgcaacaagggctttactcagctcgcccacctgcagaaacactacctggtacacacgggagaaaagccacatgaatgccaggtgcgcagtattttctgggtagaccttctgacctttgtagaaaatgtctgtgagtcaccctcccatgtcctatatagcccgtagttaaagccaacaccagattctgcgttgtcccatcctggactgatggcactatggtccttcccagtactttgtatctgctgatgacttgagatggcacagccagcttccagtgggtgggaaaatggtaggggaaataaacagcccctcgtgtgctgtgtgcccacatccccccgtttgcttaataccacactggaggtgccacaaggaggcttctcacctcctaggttgctgggcgttggccggtaagcctgcccctcccgttggcaactcttaatcttctggccttcctgtctcccttccctgctgtctctctcccctacactgtaggtctgccacaagagatttagcagcaccagcaatctcaagacccacctgcgactccattctggagagaaaccataccaatgcaaggtgtgccctgccaagttcacccagtttgtgcacctgaaactgcacaagcgtctgcacacccgggagcggccccacaagtgctcccagtgccacaagaactacatccatctctgtagcctcaaggttcacctgaaagggaactgcgctgcggccccggcgcctgggctgcccttggaagatctgacccgaatcaatgaagaaatcgagaagtttgacatcagtgacaatgctgaccggctcgaggacgtggaggatgacatcagtgtgatctctgtagtggagaaggaaattctggccgtggtcagaaaagagaaagaagaaactggcctgaaagtgtctttgcaaagaaacatggggaatggactcctctcctcagggtgcagcctttatgagtcatcagatctacccctcatgaagttgcctcccagcaacccactacctctggtacctgtaaaggtcaaacaagaaacagttgaaccaatggatccttaagattttcagaaaacacttattttgtttcttaagttatgacttggtgagtcagggtgcctgtaggaagtggcttgtacataatcccagctctgcaaagctctctcgacagcaaatggtttcccctcacctctggaattaaagaaggaactccaaagttactgaaatctcagggcatgaacaaggcaaaggccatatatatatatatatatatatctgtatacatattatatatacttatttacacctgtgtctatatatttgcccctgtgtattttgaatatttgtgtggacatgtttgcatagccttcccattactaagactattacctagtcataattattttttcaatgataatccttcataatttattatacaatttatcattcagaaagcaataattaaaaaagtttacaatgactggaaagattccttgtaatttgagtataaatgtatttttgtcttgtggccattctttgtagataatttctgcacatctgtataagtacctaagatttagttaaacaaatatatgacttcagtcaacctctctctctaataatggtttgaaaatgaggtttgggtaattgccaatgttggacagttgatgtgttcattcctgggatcctatcatttgaacagcattgtacataacttgggggtatgtgtgcaggattacccaagaataacttaagtagaagaaacaagaaagggaatcttgtatatttttgttgatagttcatgtttttcccccagccacaattttaccggaagggtgacaggaaggctttaccaacctgtctctccctccaaaagagcagaatcctcccaccgccctgccctccccaccgagtcctgtggccattcagagcggccacatgacttttgcatccattgtattatcagaaaatgtgaagaagaaaaaaatgccatgttttaaaaccactgcgaaaatttccccaaagcataggtggctttgtgtgtgtgcgatttgggggcttgagtctgggtggtgttttgttgttggtttttgttgctttttttttttttttttttttaatgtcaaaattgcacaaacatggtgctctaccaggaaggattcgaggtagataggctcaggccacactttaaaaacaaacacacaaacaacaaaaaacgggtattctagtcatcttggggtaaaagcgggtaatgaacattcctatccccaacacatcaattgtattttttctgtaaaactcagattttcctcagtatttgtgtttttacattttatggttaatttaatggaagatgaaagggcattgcaaagttgttcaacaacagttacctcattgagtgtgtccagtagtgcaggaaatgatgtcttatctaatgatttgcttctctagaggagaaaccgagtaaatgtgctccagcaagatagactttgtgttattctatcttttattctgctaagcccaaagattacatgttggtgttcaaagtgtagcaaaaaatgatgtatatttataaatctatttataccactatatcatatgtatatatatttataaccacttaaattgtgagccaagccatgtaaaagatctactttttctaagggcaaaaaaaaaaaaaaaaaaaaaagaacactcctttctgagactttgcttaatacttggtgacctcacaatcacgtcggtatgattgggcacccttgcctactgtaagagaccctaaaaccttggtgcagtggtggggaccacaaaacaaccagggaggaagagatacatcattttttagtattaaggaccatctaagacagctctattttttttttgccactttatgattatgtggtcacacccaagtcacagaaataaaaaactgactttaccgctgcaatttttctgttttcctccttactaaatactgatacattactccaatctattttataattatatttgacattttgttcacatcaactaatgttcacctgtagaagagaacaaatttcgaataatccagggaaacccaagagccttactggtcttctgtaacttccaagactgacagctttttatgtatcagtgtttgataaacacagtccttaactgaaggtaaaccaaagcatcacgttgacattagaccaaatacttttgattcccaactactcgtttgttctttttctccttttgtgctttcccatagtgagaatttttataaagacttcttgcttctctcaccatccatccttctcttttctgcctcttacatgtgaatgttgagcccacaatcaacagtggttttattttttcctctactcaaagttaaaactgaccaaagttactggctttttactttgctagaacaacaaactatcttatgtttacatactggtttacaatgttatttatgtgcaaattgtcaaaatgtaaattaaatataaatgttcatgctttaccaaaat

SEQ ID NO: 52 - DNA, 24552 bp, Homo sapiens
caagagagagagagagcgtgcaagccccaaagcgagcgacatgtccctttggggagcagtccctctgcaccccagagtgaggaggacgcaggggtcagaggtggctacagggcaggcagaggaggcacctgtagggggtggtgggctggtggcccaggagaagtcaggaagggagcccagctggtgacaagagagcccagaggtgcctggggctgagtgtgagagcccggaagatttcagccatgcctcacagctccgacagcagtgactccagcttcagccgctctcctccccctggcaaacaggtagagtcctcctttttctctctcctaccttctgattctcctgggggatggaaagagagccaggcttccttgtcctgcccagggagctgaggatggaggaagtggctcgttgcacgggcactctgttagacttaggacatggaatttgctactaagctgtgcatattggcagagatcctcatccttccacccattctgccaaagcccctttttctctccattttccaaggctgcctatcacctctgcctcactggggttgccaccctaaaaagctttctaggaagcaaagaggaggatgaacatcaaagaatgcagagaaaagagtctactgttctccaaggctgtagaaaagtgagaggagttttcaagtgggccgctggcatgcacagctcaaatcctagatatgcagtttcccaggagacagccaatagggaaggggagaaaaggggttagggaaaagttaaaaaaaaaaaaaaagaagaagaagaagaggaagaaggaggaggaggaggagaaacccaggctagcatagaaggatctctctactggggcactgcctctgttgctagcacagccagcaaggggagatgctagaggtccagccaatatctctttgcttgtggcttctggataggagcaaggaaatgaatgaggaggtggctctggaaatttgttggaagacatttgctggtagttcatcttagctctggggaaaccagagagactgagatagggattgtgggagcatttggagtctagattgtgacttccaagtccaaaggttttagcttgaggattaccaaaaaaggagtgccctgcccatctcacagcttctagggttttgttctgcaccacactcttgacatcccttgctgtaggaagccctcctctttctcatccgacatgtatccgtgggttaaaattttctcaaccttcatagtttaaaaacttcattctttccttagcacagatatccacaagggttttcaaaatgctgcagccaaaataaaagtatataaatattgaacagggcgtatatcctaagcctctaataacggagcagcaggctgggatgagtctgggtggagacctctagaaggcacagaatccagtctgctgctcaagatggtgtcagagtggctctgactgcctggaagtttgtacttttcttaggaaggaaattactcatggcttccatggtaacctggtgccccatcccccttagaggaagagcacttccttcctatctatgccaatgacctcctaccacaaaggcctgaaagtattggacatgttggtgagcccagtacttagtgatcccagagctttgcccttggatctgtgcccctctagcctgtgggagacgtggaagggaacagggcatgagttgccaggactcctacacctacactgcagcatctgggagagaactggagctaacctctctgcccaggcacaggacatgcctctctctgggtgtaattagagaacacccaaagatccccttatcctaccaagcacccatctactgcccaccacagccaggtcacctccaccattaacgttctttttggcattgatgtgccaggcattgtgctggggccatggggaatgtcacagtggctgagcacaacggaaggaaagaggaggcagatctgggatgcaccctcagctcaggaatgcagcagaagaccacatggggtgcagagtagctagcggggaagggtcttggaaagccattgggctcagcaccagaagatgtagcactctcagatgaccaggagtccttgggcacactcttagagcctcagtttcctcacatataaaatggaaatgatgatatcaacttcacagcattggggaattaaacaagagcacttctgaaagaacacttgcccagaggttggcatatagtaggcactcaacaaagtctgaaaaaaagaaaacagctaaaagaacagcaagaagagcctaaaggccaaaaagtgagagggcgagggtggagcagccctacagaggagaggtgataaaacacacttcatcgccttaaccattttttttttttttggccaaatacagctctattgagtcctcaagttctcttttctttttcctgtagctattggtcaaaaaagtcagagacctgggaatgtgtaagcaggcatggagaagagctctccttcgggtgcaggcttttggtaaatagagggatggagggttcatgcagagacgaaggcatggaaggatggctggacggataccacacaccaccagagcctgctttcactcagaagggagatgcagacccatgtaatcctccccgtctctgcttcccaggactcatctgatgatgtgagaagagttcagaggagggagaaaaatcgtattgccgcccagaagagccgacagaggcagacacagaaggccgacaccctgcacctggtaagtgttcagatcaatcttcatcctcgtgagctttaggctttgccctccgccatctgggaacccttggaccatagctttgattctgcttgtgtggggatgtgtatgtggggtgggttagtggagggtgagggccgtggggtgaggtagggaagggaagctgtcgtgagagtgctttaagaaggctctgtagtccgggcgtggtggctcacacctgtaatcccagcattttgggaggccaaggcgggtgggtcacctgaggtcaggagttcgagaccagcctggccaacatggtgaaacctcgtctctactaaaaatacaaaaaattagccaggcatggtggtgcatgcctgtagtcccagctacttgggaggctgaggcaggagaatcacttgaacaggcagaggttgcagtgagccgagatcgcgccattgcattcaaacctgggtgataggagtgaaacttcatctcaaaaaaaaaaaaaaaaaaatagaaggctctgtagcagggaatgggccaggaggctgaacagagaaatgggcctttctaccccaggagggctcaaggggtgggagaaggcagagctgtattgggaaagaatttagaaggtatcaagtgctttggggacggcccattgtctcgcagtgcaaggaccacacatagtcgcatcccttggcagagacccaaatgcccctgcatttgacacaaggaaattcacagggcgctgtaccagattcctcttttcagagcattattaaagtcttattttgaaatttctgtctttaatggtatcccaaggggtctatgaaagatgcaatttcaagtgcccttatctgggatgatcaccatcctagttgagttgcctctagtcccaaatttttctagagaaagcttttacctctgtcttgagtggtccaggggccttgagcagtgctgaactgcagttccgccagtggccaaggccctagatggtgtttctaggttctggctgtgccccttataaagtactgcttcctccccattgctcataccttaccaccttacctctcttcactctgcccccagtatggttcttgttcaaccaactcttcactagttcctttctctccatcccctcatccccttccctagcaactctaccttcctgcccttgctccagaaacattcccttacctctaatagcctagcaattcctttccatggaaaaagtgcaattggcaccaaaaatcaataagcttgtatttatctggaagattagcatgataatcagccagttagaatggctgtgttaaccgtatcaagaataagtaagtaagatgtagttttaggggaaataatgcatctttcagctttacaaggaaacagagcagactgcaccaacagctctgattgggtgcttgggttttatttgaaatgtattcagcttacactccattgcacactaacattaaattcacagctatttgttaactttttggaaagaatgaatgaacagaaagtctgtactaactgtgctcaacagtctgaatgtcaagtttttggtggccctgctgcttgtatgttctccatgatttcactgtgtccccacattctggtttaccaccttaagcttgaacatctatgatccttacctctttctctatcagagtctgattctgattcactattctttagggcaagcaaacagaccaatcaaaatttaaaaggataaaatcttccttgtgtacaagtagacaatgtcctcagactggcaaactgctgtaagctttttaagtgtgtacctgttttcttaagtggaatgtaagtatagttcggcagctcagcagtcagaacagggattgaatcccagccctgctgcctactatctgtgtgacagagacgttcttggcctcccttgggcttggtttccttatctagaaaatggaaaatgacaataactaccctatacagatcgtacatttaaagagcccaacacaatgcctgtcattcataaatactcaaaaatttaagtataataagagtaataataattatcataagaagcaagataatcacaaattatacacacattttatatatatatgaaaacatatatacattttgtgtatatttaatcacagaagctcagggttgaaaggtttcttaaaggctagaaagtttagacataagtttgatgcttcagacttctctgcaacacctccagccaatggtcccattgtatgcctggtcacttctagggctggagatcttcctctctcccaatttatgaacagaagagtctttcctatgttaagctgcacccctgtctccctgtaaattcaactcactggtcttcatccaaacccttggggaacgtattaatgagggtgacacagatgtctctttgctgcggcaaggctttcagcactgaatcagctctctccctctccaagacaaatgtcagagcccaaagagtcagctcatctaattatacaagtcatgtgacattagggtaatctctagagcttgagggtccacagagccccaagtcatatagtcaacatatccatagccacaccccagcctcagtttctagaatgttccaatcttccccacatctgaacacagattcctcctccactgctttcttttgagcaccacagcatcgtctttaccttttgcccaatgagtaggtcgcagcggagttgatgcagcaagcctgcggactgctgccaatgcaacttatgtttcttggcttcaggtagaagcttttggcagcaacgtgttcaatctgccctacatcaaattagctgtggtttgacatcttcctttcctccgagatgacaatcacctatcttctccatccattatcctcttaattatgtctgagattcaggtgaaaagtcttctggtttaccaccagtgtcagggctcagtgtgtggtttgcccttgactcctttccatgcttggctccacatgctggggttgttctctggccctcagacatggccataggcctcgcctaccagtgctttacagatgagggtttgggagctactgagagtaccatatcaaaaaaggaccacattcctattagggttctagcctcatatatactggtatgttttcttagtttcaactgctgtcactattatcaaccttaaaatactgaaacaattatcttgttcctctagtgagagtgtgggatgcttactattcgacattttcagcatctatcctataaatggctggcaccaagacactgtacatcgattgctttaaaaattgacagagtagggagagagcctctttttatgattgtgttataaatccctggccttgactatctctgacataaaatggatcggtgattcctttcgtaattgtgacatcaacaaacaatctaattctgttttaattctccttttgttgagcatctcacacaagcaccctgcacacttagttccttttctcctgcagacaactgtagggttcattgtatatagtacagatgttgattaaaaaagagaaaggcataacttgaccagttagtttctaaaagatatcaatagctaataagtggacctaagataatcagctgaaaaattatttgaaataataagagaatgcagtcagcttctaaaattaaaacaaaatgtaataacgttcctatatgcaaaacataaccaattaggaaattaatggaaggaaagatcctgtttataataccaatgacaacagcaaatggaaggaaggaataatttaacaaaaattatgaagagtgtatcctaaatgatttttaaaagattcaaataattggaaagatataccttatgtaaagttagcaattttccttaagttaattgataaatttaatgagatcccaataaaaaacccaatagggttttctgggatttgggcaagaactagattagctattctaagtttccagtgaaaaaaaatcatatgacaattgccaggaaaattctaaagaagaagtataatgaaaaaagattaactgaccaacatattaaagtgaaacacaaatacagaaatcaaaacaatgtggaaaagacagaacattgaacaggatagaatatggaaacagacccaaaaacaaattcagattttaagacccaaatacatatttcaactcctaggacacaagtataaatacaaaatgggctgggcacggtggctcacgcttgtaatcctagcactttgggaggccaaggtgggcagatcacttgaagtcaggagttcgagaccagcctggccaacatggtaaatgttaaattttttaaaaaaaggaagctaaagaaacttgaaaagacaaataaccattaaaaatttatcttggaatgaggaattattttctaaataaaacataaaaccctgaagccataaaggaaaagattgatatacattacttttattcataaaaagtaaaagtttctttatagatcaaaatactgtatgcaaaatcaaaggcaaatgacaagctgaggaaaaatatctgtaatacatatgaccaaaaaaggtatgtttacttactatatgagagagctcttatgaataggagatgattaacaacccaaaagaaaaatgaacaatgggccgggcgcggcggctcacgccttaatcccagcaatttgggaggccgaggcgggcggatcacgaggtcagcagatcgagaccatcctggctaacacagtgaaaccccgtctctactaaaaatacaaaaaattagccaggcgtggtggcgggtgcctgtagtcccagctacttgagaggctgaggcaggagaatggcgtgaacccgggaggcggagcttgcagtgaaccaagatagcgccactgcactccagcctgggagacagagcgagactccgtcaaaaaaaaaaaaaaaaaagtaaagaaaaatgaacaatgactatgaataggcaatttacagaaaagagaaataagtggcaaataaatgtgtgaaaagatggtagaccttatttagttaggaaaatgccaattaaagcagcagtgaggctggcaaagatgaaacatgttgttgatacacgatgttgccaaggtaatggagaagcaggcaccatcacacacagctagtagtagagtctgcataaccctggtagaaggcaatttgcccacgtccattcaaattataggtgcacataccctgcgactcagcaatttgacatccaggagtgtgttcacaaacaaatccacacatcatacaattctgtacatgtaaagataatcattgctgcattgtttcttataggaaagactgaacataagctaaaaaaatccaccaataagggattcaataaattattgtccattctgtggaatattgcagatatgttaaaataatgagttacatctgaatgtgctaatctggaaggattatcacttctgtactttaagttaaaaaggcataaatatagtccatagtttgctaccattagttttttaatttaatgttttatttatttatttattttttatttttagagacagggtctcactatgttgcccaggctggtctcgaactcctgagctcaagtgatctgccctgcccaccttggcctcccaaagtgctgggattacaggtgtgagcaacagcacccagccccttctgtgtttttaataaaaagaaaaagttacatatatgcataagtataaatgcaaactttttcaaatagattataaaaaattgttaatgatatttatttctgaaaagtaggactaaagatctaaagcaagagggagatacttggcattctttaccttttatacagtttgggattttttatcacatgcttttatctttataatatagatatcaaaattctcagcattgatcattaccacacatgcattaggaggatttcttttctaattttgacatcaaacattgaataatcttccatcacgacatggaagagtattcaatcttgacgttatcttttgaacatcatacataaatatctcagcccttgggagaaccaactgtaagttgggatttgagtgactctaaggtccacagtactatatgataaaagatggcaaatccgtttcctttgtgtagccatcttggttggttggtcatggctatctggtgccgtacagctggaaggatttcaagtcaaagaccaggatcagtggaaaagagagctgaggtcaattaagaagctttattcatgaaaaggctaaaatcagtggagttgccgggagcagtggcaaatagcagtgttagccctgagccgagctgttgacaagtcatatctggcctggtggatggagctgaaagcaagtgagagtaacagccaagtttgaaagcttgagatttaggtactgtcttagatggaagtgggccaggtgcttgcctggggctgcctcctgaaggagtctcacaccagtataagaaaaaagagaggtttacaggctccagggatgtgctttgtcatatatgacagaaaagtcatgagtataaattatgcattaaatgaagctttgagctaacactgtgagaaatacggtatttacaattggagaaaaattgagtaatggaggaaaagatgtttgggtagcactattgttcttggccttctgaggaggcagagaaggatgcttacggtcctatttcactcctggaattcttttgctctctctgggagaccatgccataatgtttgttggcacagataagtcacaggtcaggaatgttcaggctagttccacccttaaaaagttcaatgtagaatcagtgaaccatctatggaaagagatgcgacccttctgtctccattgctatgaatttcttttaagaaaaaaccatgttaattgaacaaacgactatgtattaaccactgtgcctcaagtgctctccctgcagcatctcatttaatctgcataaaagctgtattttataattccttgcattaagtaacttgatggagatgacacagcttgtgactaggtctgtctgacgtcagaacccattttcctaaccattaagttttactgcctctttcttcaaactctgatgaagatgtattcatcttccctaacctatattttccttgaatctctacatgaattaatttttttgtcttttaagcaatatcctccaaaatctacactgtcccccagccatcatcaggcgtgatcaagaaagtaaagacatgtttactttcaatacagtatatccattgtacaattgatatcatatatgtcatatatatcatgatatcaacatatatagataggtactatatatagatagatacaattggtatatcaaatgatacaatatgtcaattgaaatcttttttgagaagtctgtgtagcaataaatgttaacatctttcacaggaattacctttgacacaacagagtttgaagaaaaaataatttacaaagatgcttagttcatcattatctgtgaatagtaaatactttaacaatgctataaaacttgacagggggcttacaacagaagatgaagcatattatgatacattcatacaataaaaaaatttatgctggtactaaaaatgattatgtagatctgtatttatcagcatagaaagatgtcagtgatacagcattaagtgaaaaaggcaaattacaaagagcatgcagagtataaccctttcacgtaaaatttgtgggttttgggcatggtcgcatgcataaagagatatccggaaggatattctccaaaatgctaatagcagttatgagtggttgagtttgggtagttcatcttattcttggtacttttctctcttttttattataatgaatgtgtgccattttaaaaatcagaattttaaaaattaggctattttcatttggggagggaaaacacatcaaggaaatccaccacccctaactgcttgtcttaccgatgacgggtcggcatggctaagtttgggaggcatattggaaattgggagtccagctccatgctggtgttgatgctgtaaagaacgactgtttgggaggccaaggtgggcagatcatgaggtcaggagactgagaccatcctggccaacacagtgaaaccctgtctctactaaaaatgcaaaaaattagccaggcgtggtggcgggcgcctgtagtcccagctactcgggaggatgaggcaggagaacggcatgaacctgggaggcggagcttgcagtgagctgagatcacaccactgcactccagccaaggcaacagagtgagactccgtctcaaaaaaaaaaaaaaaaaaagaatgactgtctgtctacataggatgatggtcctaggtcacaaactgacagctgcctgttcagcagatgtcttgatggagctattctcagcagcacccagacttccttctcttgagcagaatgggagtctccccagagtgcccttgtgcaagcttctcagaggttttcttactcccctcttttgaacttagtctagtcccctgcttcctaggaggggtgggttgggtccacagtataaaggccccttcagattgtgggatatctgtagagggttccactacgggttcacatgatggcttgtggagggaataacaatcataatagtcatactaccttgttgataaaatttcagaattaagtgggaactcagagatcttctagggtgacttgccacatttccaatgaggaaactgaggacgcccaagaacccaaacctcttgccttcccaccagtctgcttttgtttcatgccactttgctgaacagagctttactaggcaggtgtttacataaggcctattgcaaaggtgggccaagaagcaggccattaaccagaacacttgaactgcctagacactcatcagctccagaacatacggctatacatgagaccagaaagagagtgagtccaaacttgacaggggctgaagtgtaaatgtttctttgtttaaagagattttaaagttgtaatccaaaattagaaagggcagtgacatattggggaaaatatttgcatcaaattaaagaaatgaaggtttaatatttatgctacagaaagaaactcttataaagcaaaacatcaggactccaatagacaagtgggcagaggcaatgaacagaaagcttacataatatttttcctaccaaaatgaaaataccctaatttcctattctgattatgaaaacgatacacactaaggcagggtttctcaaccccagtggaactgatacttcgagtccgataattctttgttgttggggattgtcctgtgccttgtaaaatgtaaaatttacccacaagatgccagtagaacaccccctcaccctgcttagtttgataaccaaaaatatttccagaacttgctaaatgtccctggaaaggcaaaatcagtcctagttgagaacgctacactaaggagaaagacacatggaaagttgttctttctccttaatacttgacaacctgtaacattaacatgaaattaagaagccttcatcaagctaattggcaacaagtaaattatttaaaattataacacctaaatgccagtgaggttgtagtgaaatggatagaagcattcgctagtggtgacattatatacttgatatgaccccttttcagtaatacttctcaggactgggaagattgaatgcctcctttgcctcattcatttcattcctaggaatttctccaaggaaatcactgaacagagacaaaacccagtgtgcatcacgatgttcatctcagcattatttttaatagtgacaatttgatagcaaccaagatgtccagcattagaagaccactttaagtaaattgtggataatcaatttgatgatgcagtcattaaaaattatgttgactatgtagatgtgacaaagttatgacagaaagcaaaatacaaattgtatgtgtactatgattgaaattttgtaaaaataagtatgcatgtttgttcaaaaggatgagatggccaagtgggatggttcatgcctgtaatcccaatacatacggaggccaaggcaggaggatgacttgagaccaagctgggcaacagagtgagatcctgtctctacaaaatataaaaataaaaataaaaataattagccaggcgtggtagcttgcacccagctactttagaggctgaggtgggaagatcacttgagcccaggaggttgaggctgcagtgagccctgattacatcactgcactctggactgggtaatagagtgagaccctgtgtcaacaaaaaggatgagatctcaatatgtgtaaatgaaaacagctgtattaagggactaggatcatgggcgtttttaacttttaaaaaatatctttaatgtagttatactgtatttttttatttttaaagaaacagaagaaaatggccaaatagagagctgaaggaactctggaggacatcaagtacaaagagacaatattactgagctcgaatttggggatcaggttttggtaggagaccttataatttataccccaaataggaatacttcgagagtggaagatggaacttgtaaatattacaccaggaaaacaggtgtcccagtaaatgtctggtcaccctagacagggaaaccaagaaagatgacatgaagctcttatgaaaactcagaagtgataaagttcagagtcaagtagaggggactggattcctatgaccaaaatgtgatttcctgcaactgaggaccctgtaactaaaaaagggtactcagctggcataagaatatgtcttatcattaagagagtaggatgacacagaaaattataaagcaaaggccatattatcagtactagagctgagatcagcggaagtgattcatctactcaacaaatatttatcagccaggaacagttcgttctaggcactgagaatattgcagggacaggacagacagagtctctgatttcacgaaccttacagtcagttggaagtcaggctggaaaacaaataaacacactaatcacatgacatgtaaagtgcttcaaagaagatgaaatcatgcaatgtggaaagtgtctaagggacgggattggggcagcgatcaggggaggccttcctgaggccctggaatttgagatcaaaggtgaatcaaagaggagactggaaagatctggggagagggtgatctcagcctagagagccttgaggccaagctgcgaggccaggcaaaggtcagaaaggtgcttggtaaggtggagaccaagttcaagaccataagggagtgaggaggaactcagtaataatggcaattgtagggctgagcacagtggctcacacctgtaatcccagcactttgggaggccgagttggttggatcatttgaggccaggagttcgagaccagcctgagcaacacagtgaaaccccatctctacaaaaaaaaattttttttaaatatccaggcatgcacctatggtcccacctacttgggaggctgaggcgggagatttgcttaagtccaagaggtcgaggttgcagtgagttgtgatagcaccactgcactccagcctgggcaacagggcaagatcctgtctttaaaataaaataaaataaaataaaataaaataaaataaaggcaattgtgctgctaggagcaggaactggatggggcatgtggtggggacccaactaattcaaaccctgcctgggggatttctctgaacctaaactctgatcataagttgagaagcaatagcacctcactaggctgtttgaccgtttaattgagagggcaaatgtaagaacaaagcaatattgtcattttttttttacactgttcctttgtttaatgcagacagcctgcccttttcctagaaatcaatcagatatattatcctacatgaacacacacgttcttctttctggttgcttataaactctttaaggatatcagtagtttcaggggcttggcctttcacaactaggcaagtctcctttgttgggtatgaatggagagagggtcaaatttgaactagggaaatggcacgacgaagttcttaaagtggttgtaattctgccactcccacgctgttggttcagtttggggaataaacagaggtttgacctaggccttttgaaaaaatgaatctcttggattcatttggaagtatcccagatttacaaagtagaagctattaaagtgtttgagtggtggttaatcactctctaggaattctcatggacatcacagatttactcagctgacccttcttcataggcacatctcagattttggaaaattattccagattataagttggcagtcaagcaacgtgatttgatcgaacacttactctatggcaggcactgtccttgtcactgagaacaaaacagtgaagacaataatagctcctgccctcacagagctcaacaatgtaaatggtaaggaaacgaaacggttaaagttataattaatgaaacacgaatagatccctgagctcttgcctttccattatatgaatgaactgtgctggactatttagaattgtttccaccaatttaagaatataatagtagtgtgcttaaatggacattttgttttagaaatttttttaactagaaatagtctcccaactctttaaattttttaatattatactataaatgataaaataaaatacatatttaataaaatgaaaatatgtaaaaatataaactctttaaggatatcagtagtttcaggggcttggcctttcacaactgggcaagtctcacaaatttaatttgtttgttaacaaacaaatttaataaaatcaaacactatatagttatgttatatttttattattttgagataaggtttcactcttttcccaggctggagtgcagtggtgcgatcatggctgactgcagcctccacctcccaggcacaaatgatcctcccaccttggcctcccaaatagctgggactacaggtgtgtgccactatgcctggttaacttttaaattttttgtaaagattgggtatcactatgttgcccaggctggtctcaaacttccgggctcaaatgaccctcctgccaaagaagcctcccaaagtgctaggattacagcaactgcacctggccttatgttattattaaaaggaatccactatgaacatgattttttgcccatttggctcacttaggaagcatttttaaagtcttgatgcctgcaaccactccagaacaattaaattggaacctctgggggtctggcatccaggaatccagactgtttaaggctctccgggtgctggcagtgtgcacagccagggttgagaatcagaagcagtacatttgcagcctatcaggtctgtacctgaatatgtggagtgagtagaatgtgtggagtgagcagaatgtgtggagtgagtgtggggcaattgtgtgggtaagtacacagatactctgtcacatacagtggcctgatggcttaaaacaaaacaaacggccaggtgcggtggctcacgcctgtaatcccaacactttgggagcccgaggcgggtggatcacgaggtcaggagatcgagaccatcctggctaacacggtgaaaccatgtctctactaaaaatacaaaaaattagccgggcatggtggcgggtgcccgtagtcccagctactagggaggctgaggcaggagaatggcatgaacccgggaggcggagcttgcaatgagccgagatcgtgccactgcactccagcctgggcgacagagcgagacacggtctcaaaaaacaaacaaacaaacaaacaaactattcaaacccttgctttgatggcagttattatttgttttgttgtttggttttgaacattgataatcttgctagtggtaacctttgtaactcgaagcatcagtatcagccaagattgcatgcattcagagacaagtgagagaccagccatcaaatgaggaatcaacaaatcatggcctacttttctcatgtaacaagaagttcaaaagtggagagaccaggctacagcaaggaagaaccaagctccttctctctaagcagccatcctcagtatgaggctttcattctctaggctgtgagatgggtgccgagcctctcggcatcagtctatgttgaaggaaggaagcctttgtccttatgagcaggctgtgcctttttggtaggaagggaagctctgccttcacctccctcccgcccatcaggtacttctgcttacgtatctttggtcagaattctgtcacatggctacccctagctacaaggtaaggtaagctggaatttttttttttttttttttttttttttagcaattcttttcccagtctttctagaggaaggcaaggcagaaggggtttgggatggacgctgaatgaaccaaactatagtttttttcacatttgagggcaatgaaatcatagtcttgaaaaccaaggaccaggcgatagccttttcaccctgtgactagacaggtccctgagggcacggctgatgtggccaatcttctgtaaatgcaaaggtgcttatggccctagagcttcagctctaagacatgaaagtgaaggttcctccagaatcacacacgtgcattattcagcgcaaagatctgtggtttggtgattcttcttctcctttcataaggtgagaggcagcagttggggtgaatttccccaggaatggtgggagatgtgggcctagatcctcccgctgcttgggaagagtcgtacttttcagttggaagcctgctccaggaatggcgggctccaccctctgcatgtgacgtacaggggctggtaactgatggagcctgaacatatatctgggtgtgagggataagcttcgaacgccacttaagtgtaggtgggagccaaaaggtcaccctgccaatacatgattacatgtcctgttgaggagaaaatacacagggactattttcacccttctggaaattgtgattagaaaatgcaaggagaaggccaagacactaaactggagctggtagggaggaagcctcagccctgctcagggtgcctggacagtccccaccagggcccagctaggaaatgccagccttgtccttggtcttcgtccctaatggctcccggcgggtgagggaactgcctggggattccccatcgttgaagcgctctgtgagtgaccccctcctaagcccctccagtaggggatttcccagaatgttcccacgcccccaggaagcctcttccttagccacccccaagctgcttgcggttcatggtagaggtaggtggcatcaaatgaccccacaggtgagggatttgcctgaggtgggaaaagagggaagataaaattggaaagccaccggggctgaggaattatctcataggagagaactgtcaaacagtataacgtttaaacagactttaaaggcaagaaaggatggagggcacagactctgaagccagagtgcctcaattcaagtaccggtgctgcaacttccaagctgcgtgatcttgagccagtgacttaacttctctgttcctctgtttttcctcttctgtaaaacggagataatattttctaccacacaagtttgttgaaaatatcaaatgtaatgataaccataaaatacttaaaagagtgattggcacacggaagtattcaataaatgttagttattggccaggcatggatgattcacgcctgaaatcccagaactttgggaggctgaggcaggcggatcacttgcggtcagaagttcaaaaccagcctggccaacatggtgaaaccccgtctctactagaaatacaaaaagttagccaagtgtattggcgggcacctgtaaccccagctacccagaaggctgaggtggggagaattgcttgaaccagggaggcagaggttgcggtgagctgagattgcaccactgcactcccagtctgggcaacagagagagactctgtctcaaaaattaaataaacaaataaatgatagttaagttaacctaggctatttttttaaaaaaattttggtttctatccacctttttcgtataaattgagccaggttacaccttagacctattagatcagaatcaggcatcaggattgctaaagctccccaggggaccccagtgtgtggatgaggttgagaatcattgttttggtccagtctttccattttaaagtgaggcaactggagctgaatagggaaatcgagtcactgaggatcacccagccaggaccagggcccaagttcctattcccatttaccgctgatggagctcaccgtggtcatgagttcaggacctggctctgtgtctggaggaaggtctggcctcgagtcagcccttgtccagaatatctggccaggtgaccccctctccatgcagcccaggaggcagatggtcagctctatgattggaagaatgtgagtgactcagggatcttgtgttgtgttgtgttgtgtgtgggtcaccaaaaccgagacccagctttctcctgggagacaacagggtagccaaggacttatttttttgttttgttttgttttgttttttgagacagagtcttgctgggttgcccaggctgaactacaatggtaaaatcttggctcactgcaacttctgcctcccaggttcaagtgattctcctgcctcagcctccggagttgctgggactacaggcatgcgccaccacgcccggctaatttttgtattttttgtagagacagggcttcaccatgctggccaggctggtcttgaattcctgacctcaagtgatctgcccacctcagcctcccaaagtgctgggattacaggcgtgagccacagcacctggccaactttctagtgttctcgggagacctttgcccactcaagtctccagtctctcgggggaagcagtcagtgtgagagaaggaacacagggccccgagccaagccctgctctgcgcctccctcgcgggcaatgagtctttgcatcaaacactcaaagtttctgaacttctgagaaaacaagtgccttgaggtgaatcctatagcacagctgtcaccagcctgtggtcattttggagggtatgtggcataggtttgtcccagggtctcagttgtcctcatctgtagagtggggataataacagctgaccttccctatcccacacagagcgttattgtgaggagtctgatggacctggatgaattctgaataggagaaagatgggtacatggatgcccaaatgcaggctcacccccacccctctcagtagcagaagacatgcatatgggagaagctgcatttcctcccagcctcactgtgctctaggtgtccagccctcattgttaggggatgtcactgttgtacctctggataaacagctgctctcatgccacctttgccagttgtcccttcagctgggcgagccctttccagggcatgactgccccaaggagggccagaggggactgggcaatagcagggacatggagggacgaggccccagatcagccacttcctcctgcaagggaagtcaaaccctttctctcataagtgtcaggctggctgcacggtccctgggctggcagggcaggtttcttgggggccctagcaggaagcactcttgcttcccaaggtaaagacaagtttcttatcactggcggtggttttctggttagaggcagcaggcagcggttacaaactttgcctagagctctgggatctgcaagccagggagggggaggcagacgacagagctagagtgagctcagcagagcttgcttagggaggaaggacccgctgtcacttcccgaaagctgggccagcctctaggcggggagaaggtcagagtggccctcccttctgcctcggggtttgcccaggctcttcagagcacagaatttacagtaaatgttgtcaccagtggaaactctcagagggggcgaagaaaagggctagaggaaggagccaggactcccggcccccagttcccgtcttaccaacaccccctagtctcatcgtgttgcttgatcttacctttcggtaaagaggggatgccctccttctgggatgtgccaggaaatacccaaatggtaaaatgaatgagccggccacaccttgcagaaggcagggctgtgactccatcatcgtggctcttgataactcctctgccccgttttagaggggcttcctttgtactgaccttggcacactttctagctcagagccccattcaagaaatgccaggttgaggctgagcatgcttgtgtctgtccttcacagatgatggaacctggcttgatgagcaaggccatgttggtatatgcttctctgccatttagaaagaccccccccaggatgtggggtttaagatgattgacagtataaccgattaacctcattagcctacagctcatgcacctgatggattcgttagggcaaattttattttattattttattttattttttgagagaggacctcactccatcagtgaggctggagtgcagtggcatgatcatggctcactgcagcctccaacccctggtgctccatagctaattttcttttatttttattattgtagatactgggtctcaataatgttgcacaggctggtcttaaactcctgggctctcaggaggtagaggttgcagtgagctgagatcgcaccattgtactccagcctgggagacagagcaagactgtctcaaaaaaaaaaacccaaaaaaccaaaaaactgctgggctcaagcgatcctctcacctcggcctcccaaagtgctgggattataggtgtgagccactgcacccagcctatttagggcaaattttaaatgtcaagttatcttacatctgctcaccacccaccctatttttgagttaccttcttcattccagcagatgatgtcataagtctgtcagtcaacaaacatctgagttcatactatgtgccaggcattgagccaggcattaacaaataggcatttaataagtgcttgaataattaaaacaaatttaaaataatatttaactagtgctttccaacttgcctgatcattagaatgacctgtggcactagttaaaaatccaaatttcactccctagtagtctagtggctaggatttaaaaaaaaaattattattatttttttaattcagctctgcagccaggcatggtggctcacgcctgtaatcccagcactttgggagaccaaggtgggcagatcccctgaggtcaggagttcaagaccagcctggccaacatggtgaaaccccgtctctactaaaaatacaaaaactagccaggcgtggtggtgcctgcctgtaatcccagcaactcgggaggttgaggcaggagaactgcttgaacctgggaggcagaggttgcagtgagccaagatcacactactgcactccagcctgggtgacagagtgagactgtctcaaaaaaaaaaaaaaaaaaaaaaaaattcagatctgcagacttcactccgcaaatcccaaaaccactgattcacattcctagattttaggatgggcctgaaattctattcttaacaagccttcaaattaattctcatgatatggcaagtttgggaaatactgacctaatccaaatagatttagaaaggtaagacctggtctccaaatatcaggttgccttttgaactgaaattttttttttttttttttttttgcatctccaatgatatttgcctttcctctgtggttaccaatgcttagcagagaaagtctgtttggttgagtcgaataatgtaaaccttaaaattataccggaattgcgatctcctgggctttctgaggatgggattgcttttccataattgctaattaccagattgcaattgttgattaattaatgatgtgatcagaaatcagcacttcttagcaggcatttttctgattagcatgtatttgatggttcccccaagcaacagggaaaagagtttccagaaaaaagagaagctcacaggcttgggacacccccaaaataccgtcagaatgctttctggtaggccggacagggtggaacaaaacgttgtagcagactttgaccatttagtatttatttatttcatttttatttttatttttatttttgagatggagtcttgctttgtcacccaggctggagtgcagtggcatgatctcggctcactgcagcctctgcctcctgggtttcagcaattctcttccccgagcctcccgggtagctgggattacaggtgtgcaccaccacgcctggttaatttttttttttttttttttttgtatttttagagacagggtttcaccatgttggccaggctggtctcgaactcctgacttcaggtgatccacccacctccgcctcccaaaatgctaggattataggcatgagccaccgcacctggccccatttactatttataaagaccctgagcattctagaatctgggtgcagtagacaagtatccagtgactttatttgtaagacgaaatgcagacaccgggagcttttggaaaacacgtggcataacacagtggaaaagagtgaaactggtgtaagacgttctcacaaacgaccttccatttccttaggctctggcctgccagctgctttcccttgctgtattcccgccacctcccacccacacaccctcacagagacccctacatgcatacacgcagaggaacacactcacacacacccctctatcaggttgaaccatatgaaattgcttttttgccgggaggagagatgtagtcttgctgtgttgcccaggctggagtgcagtggctcaatctcggctcactgcaacctctgcctccctggttcaagtaatgcttctgtttcagcctcctgagtagctgggactacaggcgcactgccacacccagctaatttctgtttttgtattttagtagagacagggttttgccacgttgcccaggctggtctcaaactccccacctcaggcaatccgcccgcctcggcctcctaaagggctaggattacaggggtaagccaccgcgcccggcctgaaattgctattcttataggtcacaacagacaaatatcagcagcttcacgtggttcagcctcatatctatgtgtatacatgcacacccacccatgtgcttacgtaaacgcgcccatacacacctacaaacatatatacacttgtgcacacattcacacgtgcaggaaaattctctggtgcccttctccatggctgtgctagtgaacaactaatctggcccctcctgtgtccctccgcaccccacccaccttgcctccttcctagacactaacctccggtgctgatccccacccctacaggagagcgaagacctggagaaacagaacgcggctctacgcaaggagatcaagcagctcacagaggaactgaagtacttcacgtcggtgctgaacagccacgagcccctgtgctcggtgctggccgccagcacgccctcgccccccgaggtggtgtacagcgcccacgcattccaccaacctcatgtcagctccccgcgcttccagccctgagcttccgatgcggggagagcagagcctcgggaggggcacacagactgtggcagagctgcgcccatcccgcagaggcccctgtccacctggagacccggagacagaggcctggacaaggagtgaacacgggaactgtcacgactggaagggcgtgaggcctcccagcagtgccgcagcgtttcgaggggcgtgtgctggaccccaccactgtgggttgcaggcccaatgcagaagagtattaagaaagatgctcaagtcccatggcacagagcaaggcgggcagggaacggttatttttctaaataaatgctttaaaagaaa

SEQ ID NO: 53 - DNA, 344434 bp, Homo sapiens
tgggccgcagccctccccgccccgccgaccgcggtcacacactctcggagcctccccgtgagcgggagcgcggcgcacggcgatgcgccgaggcgggcgctgaggcggcgccgcgcgagcagcagcagaggcggcggcggcccccagcccagcccggcgccgccgccgagcccgggccccaaggtgcggcggcgccccaagttcccgccatgagcagccggctcggggggctccgcggccccggggactcccgccccgccgggcgcgaccgcagcgccccgcggccccgacgcgcttaacgttgtcgcttgccggtcccgccaccgccgcctccgccgccgctcgcgtcctcgccgccaccgcctcggccgctgcagctccgccggcagcatgtctcgaaggaagatttcgtccgagtccttcagctccctgggctccgactacctggagaccagcccggaggaggagggggagtgccccctgtctaggctctgctggaatggcagccggagcccgcccgggccgctggagcccagcccggccgcagctgccgctgccgccgccccggccccgaccccggctgcttctgccgccgccgccgctgccactgccggggccaggagggtgcagcgccggaggcgggtcaacctggactcgctgggcgagagcatcagccgcctgacggcgccctcggtgagcggggggcggaaggggggaccgccttcgggggagagaacgcggatctgtaaagttggcgctgggcgagccggggcgcgagcgcagagcccgaccgctggggggcggcccggccttaccctgcacggcctagggttccagtggctccggcgacagaggatcccctaggctagggcggaagaggggactacagcactgggaaggaataagattccactcctttggggtatcctgattcgggggcctgtctgcccacctctagccttgaaccctacttcaccactgttccccctggacagccccagtgctgcttcacacccacctgttttctttcccctaaactttcccaggcactgtgttctgcagttcagcttccctgtctttcatcctgttctccagcatcccaaaggagccccaaccccttccaggaaacccttcctctccttatttcccacactctcttggtcttagcgtgaccttctctgacatctttgaattccacaggctatctgcattctatgttgcatcctttttctcacatcttcagatactttttgccagatacttttctgagttgccttctgttcaagtaatctctaatctcgagttgtcctcaccccgtagctttttttctttttctttcttatccactaggcatttattcttctctgggtaaacctggtgtctggatttctttttttttaaattaaatttaatttaaagtcccgggttacatgtgcaggatgtgcagatttgttacataggtaccaaacgtgtgccatggtggtttgctgcacctactaactcatcacctaggtattaagcttcgcatgcattagctatttaaaccgctctgtacttcttgcacctgtacctcatcctttactctctcctcaatggattctctagtgctttctctctcacattagctatttaaacctctctgtacttcttgcacctgtacctcatcctttactctctcctcaatggattctctagtgctttctctctcacattagctatttaaaccgctctgtacttcttgcacctgcacctcatcctttactctctcttcaattgattctctagtgctttctctctcattttttggtggcttctttatattaggcccttcctaaatatttgtggaatgaataaatgcctctccaaacttgtggtcatcttgggatgtctgtatcagcagtttcaggtgtacaacaaactccccctggttgtaggcatccttccagaggagtactgccttattcctgcccaggcatttcagctacccttggcttttacctcttgcaggaatgccagacctctgatccaatcttaccgtgtctgggagagctctgttttaaagaaatccactctgttgcagacagaatttgaaaaagattcagcgtcaaacctccacccatcttttatgctcaccctgaccttggatacaagagctttagctcctcctgacagcactttcacctgcccacccctaggacttttacttttttaaagtttccgaaatgaatctgaacactgatcttgtttgattactgttgagtctctcttttgagattactactgcaaatgatggtaggggggacctaagaaggagtggaaccctgaggggactgagtacgggtaccagacaggtctacaaatattcttgtggcacttgtattaatggagaatgatttttttcttttacgagacctgattgaagatgtataaatcacttattacattatttattttgaactaatttaattcttaggaacacatattgagaaacagtcatcttcctattcttgtgtattttcgtatttgatatatctttctgccactttttctttcatcattaacctagaaaacaatcctcagaatagattggctactctttgctgttcttccctgccaatatttcccaggcagcgtaattttataaactatttgatgttgcaaattgttgaaaatatttatttacaacaggagtccaatgaccccgagcgtctgtaggcttgtgtcagtacttaaagcaacatttgtgcaataaaatagttatttagtacaacagattcttatttaatgaaatgattttgctaaagataatgattagtttggggagaattgttgatataaccttggaggtttttttttttttttttttttttttttttttttttttgcctaagagaatttacagatttctaaaaagtaatgtcaatgcctctgataatgctaatttaagctaagactattttcaacaacttacatgaggagtagataaaagaaactgagaaatgcagtattttctgctagaataagaggaaggaaatagtctctgatggttacttttataagttaaatttgaatgactggctttttgctggatgaaaagaatgtatccagagaatggttttcagaataagcaatttaaaaataattgtgatgatcaaataaatgcaacagctctatatactttccatgccatagttgttttctattatgaaaagggtctgtcaggtggacgctgagaacatacaggtgaatatactgtaaacattttcaacataacacatgtatagaaaaattctccttggttaaccatatcatcaatagacttagtgacacaaataaaagagagagattatatttcaaagcagtgactcatttctgggcagtccttaccttattttatttggcaagttagaacactagctcaaaaagttccagtagattcattttttgacattgtcaggatttgaaacttctttgaatactcttcaggagatggattatgtcctctctattctctcatgaaagctggacatttttttgtttttgaaccactgagagtagccattaccagagcctttttagatgggaatttctagttgttttgaatgttgtgagctttcttgcatgccatcacaatatacttcaggagaaactgtacttgccatggaagctcctgttttgtcagttgtctcatcgtggcatgtctcagtcacttgggatttcttctttattcagaatgatttgcaaatagaaaaatgaaaatttatttattaaactagttatttgacccatgggatatccacactcaggtttttgatgcttaatagtcactttaagatgcaccgatgttgagtataaaggttataataatttctaatactatttaataagagtaagttgtattggtgaaattgaaaaaaaattccagaattcgggagacctgattctaattttgccttgaacaatgagaaacttacatatctctggacacattactttaaatatctgggatttcccaggctttggacaaactgtcatattggcatatgaaagggaaacatgggccaggcgtggtggctcatgcctgtaatcccagcactttgggaggccgaggcaggcagatcactaggtcaagagattgagaccatcctggtcaacatggtgaaaccccgtctctactaaaaatacaaaaattagctgggcatggtggcgtgcacctgtagtcccagctacttgaaaggctgaggcaggagaattgcttgaacccgggaggcagaggttgtagtgagccgagattgcgccactgcattccagcctggcgacagagcgagactccgtctcaaaaaaaaaaaaaaaaaaaaaaaaaaaaggaaaacatggcatatattataagttttaaaacttttgaggaaagtagtttactttttaagataggggcaccaaaatgctatttaatccacccaattatttaaaaaatattgtagtatctatgtggcaggtattgtgcagagcatttggaaagacaaatgctgaacaaaacatatctagtctttgatttcatggaacttctttaatcattatctttattttaatgaaactatataaagggaaaacataagaactccaattgtcttggcgaaatctaggggaagttttatttgtcattcactttgggtagttttgttcattgtgaatctctggggtgcagccataataataaaaataaccctccaattagcaggtcatgatgatgcacgcctgtaatcccagctacttgggaggctgaggctcgagaatcgcttgaacccgggaggcggaagttgtgatgagctgagatcacaccactgcactccagaccctgggtgacagcgagactctgtctccaaaacaaaacaaacaaaaaccctcaagaccttaagacctgattgaagatgtataaatcatttattacattctttattttaaaataatataatagttgggaatacatattaagcaacagctggggatttcacatcaagggtgaacttagcgacttatttatttggattttattcttaaatgagagttgcttagttaccctatcactgcgacatcaattttgggtttgctggtgtcagcctgtcagtgaagatacaccactagagtcatataagggcaaggcttctctaggtttcttgacagagaacattgcaagtggctttgaagacctcagaagctttagagagcagaatgtcaggaaaaaaaagtaacagaattggaggagtggcaaataaggagaggagagctactgacctgtggagttgttcaagaaacagagactagtgaagaggaaaaaatgaaggtggaagcttagattcaagtgacaaaaaagcataaattattattttggggaaggaaattatcttaatacatgtcaaggaaagaatgaaaaggcataaaatactttagcttctgttgatattaaataaaatgagctctctgacatgtataaaccttgaaaaaaaaccttagaaagtatgtgtgtaactaacatgtagacaatgaaaaatgtaaaaaatatattcgtaaggtaggctattggacaaatttaggtagtttaattaaagctttttaaatttggggcttaatttggctaacaaagttatagaaacagattcattaccattataaaattatataaagtatatttcagttgtttaatgttttcacatttgttgaaaatagatactataatctgaaatcagaatttaatggcaatctattgcctttctttaccttatccccaatcatttagaaacaacatgacagagttgaaagcacaaagttttggagtctgacaaatttcggtttgagtaatcctctgctgagccccttactaagtatgagtccctgggaaagctaactcttatcttctctgagccttagtttcctcttttgtgaattaggaataacaactaccttgtaggtttgttgtgtataaggaggaatattcttcttaaagcttcctaaactcaatagatgatagtttcagggtgagatctattaattttaactgaatttgaatgcctcaaagtgatctaaatttttcattttctttttttctcaataattcacttgctagtcacctaattggaaaagtttatagaataggttaacagatgtcaagtacgaaaaaaaaaaaaaaagtaataagaagcactgtattttgtcggcatagcccagacaatccattaaaaaaattaaaactggagtccctttttggcccctgggtatgactcatgtgtgtacacagacatataaaaattgcagatccaaacatttccatcagattactgactgctgtgtggcaatatgaaaactactttataaattctataaaaatacaaggacatatatatttggtagaatgtagatatttcatgacaagttaattttaaattagaaaaattgtaggtgaaagagaagttatttatttcagttgcctaagaattccaagcattcttcatctactgcattcaaactaatctgtatgtgtgttcaaaggccttgatagtgagatgcaacaattacatagctaatgctgtttatattttatggtgctgccttcttgtttggctattggttcaattgctaggctttcttttgtctttttctttttctttttttttttgaaatagggtcttgctcctgcctcagccttctgaagagtagaactttcactttaaagttacattttgtcaatgagaaatgacatcagtgattattaggtttgtaagtagaagtcagacactctgactatatattatagtattatatattatatactcctttttatatatattaaagatatatatttatatattataaatatatatgtgtatatattataaatatatttatatatttaatatattaaaaatatattttatatatattatatagtcctgattatatattcctttttagtgtatagtttatttacctttaaggactctaagatgcataggtgaagtacttgagtgctattatatatttttcccatctatgtcatcattagtctttttgttcacctttttgtcctgttgccgttaattatacagagctctaagtaaaataaaacataaatattttattgaatatgataggaaaataaatgcactgtcatttgacacatacattgttgatcatgagttactaggaaggtataattttcttttttgagatttcacacacatgtaggcacataggccgggagaatatttgcaagggctatctattgagcaggctttcttcacaggccctttgttcgatgcatgaggcagtgggttaatttaacatttaaagcctctgtccttgatattcttatgtttaacttgtgtttagcatagtatggttgttcaataaaatgcttaggagggccaggcgcagtggttgacgcctgtaatcccagcactttgggaggctgaggcagatggattgcctgaggtcaggagttcaagacgagcctggccaacatggtgaaaccctgtctctaccaaaaatacaaaaattagccaggcgtggtggtgggcgcctgtaatcccgctacttgggaggctgaggcaggagaatagcctgaaagtgggagggggaggttgcagtgagccgagatcatgccactgcactccagcctgggtgacagaggaatactccatctcaaaaaaagtaaaaaaaaagtgctcaggagaagtaaatacatgtttttgtttaattgttcaattttattaatgtttcttttgtgtttaatttttttttggtggtatatttagttccatcaaccaaaatatttagatttttcatccagcctgtgatagacatattcaagtatgcgaacctgtttgaattttgcttacacctgctatttaaagcaaaacttcggaaggaagtcgttttacaaaaagagcagatggaacagtatcctcctccttggactctttgagtcgtccatttatataatattttaagaagttaggtaaatgtaatgactcttctacagtctggattgcttatattttctgcccaattctctgtcaaatgagaagaaatgtttgtcaacaagtaggctactgttgccaaaaatgcactactaggagatggaaatgacataattatggcccttaaacatcacttcaggacaggatctgaagatctagaattatgtgctgttagctcagagtacctcataacattgagggctagagtcatttaggaggtagggcagtgggaaatatcttggaaggcgggaaatttgctggggctgttgtagggaaatgagaaagagtaaacattcttataaatagtgagaaatcacttccagagcaggctttatttgaggcttattaaacagttcttcatttaatctagtagctctcaagcttcattgaacacaagacatacctgaggaaaattgttagaatgcagattcctgggtctcatcctcagaggatctggttggatagttccagggaggggcccaaactacattttgaacaaaactccaggtaattgctcagcatgctgaaggtatgtctagaggtgactgaattccagaccttgaggactactgagcagtgagctctatgggctgatttttgggaagaatgatcctgaaagtcgcttcctttgggattaatgtatcccagacaactattacctttactgggttagggataaaggtggtgaattggtgctgttatccccacatcctatggctgtatcttttgtggtcgaaataatcttactggttgtatggtagaaggtatttgaggtttcaccatttgtagctttaattatctgtggactctgcccgtttttcccgaggatgttttgttaactgcttatgtttatgttcagtagttcgcatgtcattactataagtatcttgtgacccctttttccaaaacagagaaacagatatttgaaaaggttggggattgtagaaaaaaagaagggtggttgtgagggtgaatttgacattatcaccagcatttgtgtttttcagagtgagattgacacaacatttctcaaatgctccatctactggttcattttggaggagtgatttgtttacatgccaatgaaaaattaaaaaggtaaagggagaaaaaacagatctgaatgccagaattttttttttctagaaagaaaacaataggaggttcagatatcagatatatagggccacctctcaaaccttaccaaaatatgacactaacattaatgcttcctaatctctgcatccttagccgttcattcagtggtgaagttgggtgggggtctctcatttagttctccaagtaaataaatggtgatccaacatttgaagaatttgtatttgcagacaactctaataatctatcatgaaaggaagttatctgtgtggaggtcctgatgttaccttaattgtaagtccataaagtccacttgactcattttcctttcactgtataatatttgttatgcgtgagtctactgtggccaatggcaaaaatcagaatgttctaaaacatccttccattccttgttgctttatgtctatgcttcttcatacatgaaccctccaacttaatactgggagaggatggtttttctgactgtttttatgtacacacgcacacgtgtatatatatcgtgatttctgtcactccattttttcccctatggaatcctaacttatcactcacatctccattatgggacttattgtattgtaccttgattttggtttattctgcctctttgagatggaaatcctgtcttatttatctatgtatgcgcatgcctagcagagtatctgaattataaaggcactcaataaatgtttgttaaaagaatgaataaatgattgaataagtccttgtgtagtttatgatgtatttggtactgctcttttggctataatgattttgtgatttttaattgattattttatctgactgttctgtttgcagctttttctcagacataaacgggaatatagttataacattattttttagaatgcgttaagattttctaaacattctcctacctgacattttattgggacttcataataatctgtaggttttatgcaaattgcctctcactttgggtagtatgattatctttttttttttttttttttttgagatggagtcttgctctgtcgcccaagctggagtacagtggcacaatcttggctcaccacagcctctgcccaccgggttccagcgattctcctgcctcagcctcctgggtagttggaattacaggcgcatgccaccatgcctggctaatttttgtatgtttattaggggtttcgccatattggctgggcctggtgtcgaactcctgaccccaggtgatctgcctgccttggcctcccaaagtactgggattacaggcgtgagccaccgcaccaggccggatagtatgattatcttaaaatgcctgtagacacaacagttatttggggttgctgatgtgctgccacttacaagggtgtctatattatctcctaaagaaatgtgtatctgtaagctagagggacagtaaatctatcatgctgtgttgttcattattattttagtatgtaagaaatcctgtattaccaaacattctattaaatacaattctacaaaccagcatatccatatatctatcttacaataatcattagtggacacaatagtggcacagggagggatagtgtccttgaaaaaagtgtagagttagaaattgcttgtttaaagattggggaagagaactgcctaggaataggaagaagtgttattgggtgttttttgagggcccacttgaggttggagataatgagtatgtagatcaaattgggaagatgagtatgacatgcagaggtataaagcaatgatagtattgtttatgcattagaaggcctatatgtcagattgagcttgaggtgtttggggacaatccgctggagtggagggttatgtcttcaggaataatgagtgaatgtccaaacggggaaagctgcaataatccaaagacatttctagcctttctgtttgaacaccgatctgaaattaagactatttagaatatatctagagcattctttcactattcatttcactctctcggagtagctgatttgtttacccctcttctaaaccagaatcaggtaacctggtaactagttagtctttgagaaactcagttctaattaattgcttgattagtatttacatcatgctttcaaagttaggactaatccttgaaaagcccaaggatatttagctacatcattcatgcatttttttttatggttccaatgagtagttggtatactgtacggttttcttggctcagacttgatacatcactccttgaatataagacagtctacgggttttagagtagcagtgaccaccaaaacatttcaggttgtgttggagagtgcagtggatattttccttcttaaaaaggtagaaattcgttctggtgaatcaaacattctaagtgagctatcacatatgcagtactgatttgtaagagagcagatgaaattctatgaaatgcacttaagagtgaaaggattttaaatttgttagtcagtccttcataatcccaaaggttcacctgtgtgtttcagtgcctcagtgttgtccttatgagtattaactatcactctgctgtagattgtgtgaacatcctggtgtgggcagtgttttagataatcaagtgcttgataatagcaaacttgctctatgtagaagcactgaggaagtaaatggtacttgtggtctgaccaagttaatgtgcataccatttctcatattccaccagggagtctcttaggcaagggaaagatattgtgagtagattttaacaaaccgttttcctatcttttagacttctgtataatttggtgaatgtgcttgtcttgttttccttgaaaaatgcctatcagcccatttgtatatatacatgcacagaatggttggaggctgatcctgcaactcaatagatgctgcattctgatttttgttctaatttgactttggggaaataacttttgtctccacttcccatctctgaaatcacatctatctcactaatctctcactcaagagtaaatatgtaataaaatgtgaacagtgaatggaagacattgtgtttactattactcatgacttccttgttctgcttcacttctttcttgtaaaacaaaatattccttcaggttctttaactctctgcattctgggaaaagaggagatttgcagtctggcaaactcttcttgttatcttgggcatcactggataaattcgcctctctgaggatcagtttgttctgtataaaatgaggtttacaattcataggattatgaagattaaaagtatagtaatgcctagcacagtatttggactatagcatacgatcaatagattttggtgcctttagctaacaccttcttaccagttatcctgatactttcaattacctctagccacaatctttggcaaagtctctagataataccttttgtcatggttcgtgtttagtgctcttatgctttttatgggaaatatttccaacatttttgggcatatgacatttcagggttatactgtaggggtaatatacttataaaagatgttctctttcagaaatcttaaaaacaaatgcgatcttaccaggttcttgtttattcactcattcagttacctctcacattcattcattaattcagacagcatttattatcaaatgagcacttactaatttattcagcatatattccatatactttaaacacatgaatgaagtaggggctctcagaaaaaacattttacattgtcatttttgtatttaaaaatgtaaaatcacgcctgtaatctcagcactttgggaggttgagatgggaggatcgcttgagcccgggagtttgagaccagcttgggcaacatagtgagatcttgtctctacaaaaatactgaagaattagctgggcacagtggcatgcacctgtggtcctggatattcaggaggctgggtgagaggatcacttgagcccatgtggtcaaggctgcaatgagctatgatcacactactgaatggcagcttgggtgacagtgagaagttgtctccaaaaaaatttaaaaaatgtaaaatcacatttaaaaaattaccaaattatgtccacagcagctattgtctgcccctctgtctgtctctgccccttattctatgctgaccttttctagttttgtgtgatgtgtgggacatagggtcaaagtacagtgtgtatctaaaaagatcagttgaagctatagtaatgatgataataatatttatttgttgagtgcttaccattatcgggcagtgtgcttagtgttccatgaattttattccattaaatactcacaatattaatgcaggggtgatgccttaccatggtcataggactttaacagagaacatcaagaacctatgtctctaacctcatcttgtactctatatactcatggttctatgatgcactccttgaatatgctaagcaagcatcattttgccttaggactattgttcggttcctcatgtcagaaatgtcctctacccacatcctttgcttggttctcccaagattggctcttccttagttttcagctttcagctcagtgtcacctcatcagacagtagtcctcctacaccaaccattctgtttcacatcactgtttgtttattcttttcatcatagcttcactatcataaattatcttatttactagtttacctatttattacctgtcttccctcttataatttaagttacacaaaggaggaaccttgtcagcgttgctctctgtgggctttgcagcacctagaatagtcctagctagaggtagggtctttatataactttattgatgtatagtgtcacttcagaggaagccttagggcttggaaaagaaagagaatatttaaaaataactcatgggggaggggagaaggagaattaacatgtattaagcaactgctatggagccagaattgatcaaatgcttttataatatgtatcactaaattttcaaaatctcataggaaaatttcgattcagagaagttgagtaacttgcctatgatgacagttaattactgacggaaataaggttggaatcttgttctgtttaactccaaacctcatatgcctttcagtattttatatatttcaagctttggtgaatgtggtggacgtcatgattcactgcctagatgcccctttagtaatgaaggactcattcctctagatgctaggggttctgttgacagtcagccctcaatcattagtcctctctatatattgcctggcctgaggagaggggccttgctcaaagtcatgccccattcccatgattaatcaccatgtgataagaaagctaggccttcttgctctaatttaggcaactctgagatcagagctctatgtagggtcagctgagacttccattgagtcttcatcatagtccaacttctccttgtgcccaattctgctttcttctctaccctttcatggttgttgatcccaagaacactccctaataagtttcctgcatgctaatctccttcttagagtctgcttcctggagaacccaactcgtgatggtgagtttgagaattgtcatggcattaacaaaagtgcaagattcagtaatgggaaggtggcatttgggagaaatataatgatagctttggatttggatattttgaatttagtaaaaatgattagctctggactgtgagatctttaagggtttgtttactgaatgaccaagctcagttaagtgcctgccagttgatttaataaatagaggattgaagatatgggattggaatctggctaagagcttgtgattgaagatagttactttagaggtgatagctagtatcttgaaaattgacaaacactctgagagagaaaaaaataagaacaacggagaattagggggaaatatacagaaagaataaaaagaatataggtgacaggatttttttgtgtgtttgtaggatgggaggtgactgggagcagctgggagcaaggacccagtggttgatatttgcaaaataatgaaatttaaggatggtcttttcaaatccagtatgattgaggttgctagtggccttagaaaagcgatgccaatcctgcaactgagataaagacctatataacaaagtttaaaaagggaatatatggtgagtaaacaaaggatattgtcggcatacatctctgactcaagacatttgataaaaatagagacagcagcacctgtgaggccaaatctaagtttattagagttggaaattcatgtttgaaggtaaaagataagtaaaaaaaaactggagatggatgagataagacttgatcaaggatagggtctctttagaggcattctctaacctatttcctaagaatgaggacacttctttctttatactcaaggggaatgtaggaatatggcagagtaggagtacagtgcaaaggctactgtcatattttggttttattcatacctaatttattattacattcttgtctagattttgtcattttaacttagtcattggccagtaattttgtatatctagcaattatcacatttaaattgccatgcaatttgcagttctctagatatatattaatgatggcagctgcactgactatgggatgtcaaatcaggtatgaaatgtcactaattcatccttcagtaattttactcaagtcatggagagtacattatttcatttgtataatccactgcttacataacttttggattgtcttatcaatagctttagacttcgggttttctcctatcctcctaaaaataagcatttataaattgaacaccatatggagggaactgtttttttatttgtgtttgtattagcttgttttgttttacttataaaagtgttttatatatatatgtagttataaaagtttatatatttatgcgagttgtgtatggacacacacacacacacacacacacacctgttcttattctctccatgtctgatatgactttgttcagtgttagagctctttttgacacttttttgatactggtagaaaggtcactaatggagggaactctcgaggtattaggagccaagtgaataggactctattttgtcggtatattaaatatattttatactgttgaaaggtagtgtggaaggtgaaataaggccaaataggacatatgtcatcaaatgtagcttcttggctctctttccttttctgggtgaattttaatcaatttcatcaagcaaggatttatatctattttatgtactgcaaaattttatgactacaatatgcctggcacattgtggttgggcaacaatttttttttttttttgagacagagtctcactctgtcgcccaggctgctgtgtagtgttgcgatctcagctcattgcaacctctgcctcccaggttcaagcgattctcctgcctcagcctcccgagtagctgggattacaggtgtccgccaccatgcccggctaatttttgtatttttggtagagatggggttttgccatgttggccaggctggtcttgaactcctgacctcaggtgatccgcctgcctttgcctcccaaagttctgggattacaggcgagagtcactgtgcctgggcaataaatattttttaaatgagtaaatttagagtgaatgtaaagattttttttttaagtataccacacaaatgttgtaagaaccaaaaaagggaatacaaatccacttaagaaaaataaaatcaacaacagcaaaaacaaagtagaaaaacagagaatatgcaaatgtaaataattattatgtcctgttattttaatttttattatttcatatatttactgtatgccccctatgcatgcttaattttactgtgtcatgagccagaaccctaaatctgtggagcaaaaaatggttccagtcattagcccaattaaaaaaaatgtattttccttgaatgcttgatcttctacaccagtcaacttacattatatactaggaagaaaaaataagttctgtctacatgatctaattatattttaaagaaattcaatagtattttattaagcagatatttgttgtttctgtgccagggatttgagatgtctcagttatttggggaaaatacttataattctatatccccacctactgctctgctacctattttcttgtgattctgtttcaaacatttcaggaatgaaatttcagaaagattttatctttcttccaacttctttcttgtataaagtcttcccaagagaaatccagaacttgtggaagaaaaattcatattaccccttcagcaaatttaagaaaaacctgtcattgtactagttagaagcttattatcttaattcagtaggtttatgtagaccttaacaaaaggaaataaatatcttgtaatgagtattgaccaaattctctcagtgcatggtcactctgagtctgtttgccttcttccaatttcatttctttcccttgtgtgattggtttaatttgtgtatgaatcatgtcttgattttaaatgttgtcttaccaattatttgctttttggcttaaggagtttgttattttctaaaaaggaaaggatagagagagtcttacaaattgtgtttttatcatagtatttacacatgtaaacccaaatttattttaataggatatttgaaggatctgtatttatctatttatatctatgtatttatctaccaatctactattgatttcatagggcaggagagagggagagagatgaccctgtcattagattctgaatttaaaagtatcacataatagaaatctggagtaggtataattacccttattgtatctttttaaaatttgccacaactaatgaaaatgtcttttacttccttaacaaaagaatatgcctccaaaggcattgttgtagggagtgataatgatgagatgattgggttgtaatggaacagagatggagggaaagagtaaaccttagatacagactattgtaattccatttgaagcttcagacagatatgagggagtttctagtgtggaagttggagaagagagatttattgtttccacctgacataaagatcagtaaatgctttgtggacctgacagtgtttgcaagctataaagtctttctctctttttctgtgttaacttattgccattgtaaacacatttcaaagaaaaccaatcttcccctttgttctgaattaaatttttttctccaaaagtatacctgcaatttataaacctaactttcctgctgaaggagaatggatgggattctccagcagcttattgcaggtggctaactatatgaattgtggtggaggaggctgctgcctactgattttctaaggacttaggcactttatctccttattcagctgcattcttgggttgcgggtgagggaaaaatggaaggaataaaatattaaattaagttgtaaatgtaattttctaccatcaatctagctttcttgactgtttagaaaaatctagataatctaggtctcaaacacctagtgaacacaaatatccaattgttttgattatacaggtggaatatatcaccttaatggtgctaatggcaactatagtgatagaaattaacaattccattggacatgtaattggaaaaagtattgtactacaagttaccccaagaaacatactttttcaaagaatatatactagtaagtcactttcaagtatgagtcaacgaaatattaccaattgtataactataaaatatgaatccgctaataaggatctacaaataagatcaaaccaacacattttggccattagataaggtattcagctactttgtgtgattataaatccacaaatcttataaaccatgtaaagatgttacataacatcaagaaaacatcttaaaaacctaaaataacaaagtttattatggttttgctcttccagagtgactaatagaaatgaatcatgggcatattaaagtcaagcctatcagtttctgccttggtattttatactagttcaacctctgatatattatggattaaggttacgaaaatgttaagtgggggcatttacttttagtaatccttattctctctctctgtctttattcctgtatcagaacctcatgccacaaaaatctgctgtaagactctcccagataaattgtactatgtacattttaaatacctaatgtaaaattattaattcaaaagaacctctcttgattgtaaggacctgcataggagtggaaagtaacctttttggaggaacatggggttgtgggtgggatggagatagctctcctggtgctcctaaaatcaaatctagtgtctggccccacaagactctgccacgtagtgatgactatatagcagtgatgcttctgggatctctcagtcagccatctggagatctcctttgcgacggtaaattatttaacgttcttggtctgtagtgataacatggatacattgggaagtaaaaacaaaataataatatatagcatttttgatgatgtggcattatacttttaaattttggattataaactgttttttttttaatgaactattactgctactttagggctcattttaaataaggttcaggaccaaatggggctgatgttgtccttatgttttataatgcttagagattccagagattttgctatttataggaataatttatggattaatatgtgttgtggtaataatgcatgccccatactgggtttgccttggaaattccagttaagagtcgttatgcatgcaaggaagttaaaatgtttttagaagctggaaaatagtaagtgatatccaatcagtaccttcttttcaagcatcataacattaaaattccggtgtgaatatatgcacatgcttacttatataacttgtgcaggacaacgtttgacagatatttgtaaagctgaatggtagagcaagatatttaaactgatgtaatatctaggaagaatttgaaaaaacatgatgccatgtcagaaacatttcctctcctctgtaagcagctgttcccaatatccctttcttattcacatcctttcaccctctctctctccttttccaagttactaattttccattaggtaatgagacaaacagatggccagaaatactacatagtttacagtttggttctcaagtgagcaagttttgatgtcttttgctggaggtcttcgaaaatgtcccccacaacaattcacatcatgatggccattttgtgataaacagcttattttgattagtttttagagtaagcagatttgaagagaattttgaaaagccaggactttgcccaactatactgttttttttaacacctaaagatacaaggcattagtgacatcactttatttttttcttttcagttttccccacctcaggactgtgagagattgatgtgcggatacatactttccctacagaaaagacagtagcaataagtgacatctctttagcgtttctaaaacatgtttttcacatacattatcccacttagattcacccaggaagtatatgaggtaggcaggacatggattcttgataggcccaatgtaagggtgaaggaaccaaggcccaaagttggtaaccaccgacattttagtgcccggttctcctattgcaaaccctaagctctttctaccatgctattatttctcagcatagccacgaagaggtctaaccttaatatatagtcttgctcgggtggggggggggggttccctatcttgcttcccctatggctcctactttgttgacttgttaaggagtggtggtagcgatttttgtgggccttgtacctcttaccagttgtttagttccagactgtgtgatgagtttacacaacataggcctgtgttagaaatgataaagggctctttcttcctcaggattctgcctctaggctgacctagtttgcctgtccgctgtcatgtttgtatgctctgggcttctgtgggtgaggcagctaggagcaaagtgacaaaagccactgatactgccaacagcttagtttatgctatagagtgcgggaagaagaatgacattacctgacatttgatttctgaatatgaaggaagtcttgattatcagataaatagttacatgcataagggtatatatttctctacctatattgtatataaactatgcatacccatacatccatgtatcttggcataaataatttattagaaggaatgaggaaataatataatatgtaatagagtgatagctagtttaaaaaatgtgctcagatagtttagagttaaactaaaaaagactttttatgttatgcagtattaatcttctgcctgcatgaattttttttccagaaaaagtgattattctgtatctctaacttaggaatctagtgcatcatagacactgatgatgtggcagtcattatctgccaaacatctgcctagtaagcacgttttatatccgtttggatcatcagattatagtcaacactagatccaattatattcagacccttactgagttttttctttcaagagaagtggaagcaatggagctaggcaggacccaccctgagtagtatgttgatgatttctacatgtctcagcatctgagacttttaaagtccaaggacgtgttcttgtcagtgtcctgaaataatcagtctcttagccactgactggctaaacaaaatgcccatggcactttggttgacatgtaaatgatgatttacttatttacaaggagaagtaactgtgaaatgtgtcttattactcaaaatcttaatgctcagcacatttcttacctgatcagactatctgaggaaccaagtcataattagaagtttgctttaatccatttagagtcaaagcaaaattaatttcatgctaagttctttaatccagtttatagagctttccagctgtagggaaggccttgccagtgagaactgatgttcaagggcattcataagactcatttttagttaagatggttgaatcatttttcttactttagggataatctttctcactgtgacagagggcccatatgctcctaaacagtattagatataatgtttcataaacaattcccctccccttctttttcctatgggttgccatctctaattttaccacttcctccatatcctccctttgttggtcacctttagatatgttgcttctattgctcaatggcctactttgcctggagtgaaacccaggcatgcgactggagcaaattctctgccactggtttacaaattactgttcgagttagtgcatttagggttgacagcatatctctttgttttatgtgttaattttataatttaactgtcaggcagaaatattacttctttattctcagactcttcttgggaaataccccactgaaactcccaagtactgggcacaatagagaattctttggaaatactcaaattgaagccacaaaggtgtctgaaagactagaaatgattttctcatgagatccattcctatccagtagggtacctatgagctgaaatgtcactaattagctttgcagcatttactaattggcatctttgggctgtaaggcatggctggcaacagtcctagatgttagacatggtcagtttagttcaatttagcaattttttgactacttcataatcaagagatttatacattgagtttaatcatcacataacacatatttgtgtaatactttatagttttatttcattttgatctttcaacagccctgagaaaaggttattcaggaattttcccattttatgaaaattaaattgaggttcagaaaaataaatcctgtatcccaaatcacacaggctagccaggagttaatccctttcaactataatcttttctgctgttggtgaagatagaacaatgtatttcagcttagaagggcaggttaaggggttggagattttggagggagtcagacctagattggattgtgactcagacacttactacctaagtgactttgggcaagttttttaaacttctctgggtttcattttttcacattcataaaaccggggtaatacttctgactctcttgtaagattattttgaacatcaaattacttgatgcatgtgacacgtagggtccagtgttgcactcagcacaaagctggttgctattacagtgaataacccagaaagcttccccattttacactttgaagactgaatcagccctatgccatctgtgaagttttgtttggttttgggctttaagatggaagccacgtctaccaaaaggcttttgctataccatgatccattttcctgagaaaatgtctaggagcagtgccatcttgtcttatcatcggtattttcattcacactgaaccaaattggccgtgatggtgaccagtgaagcaagtattaatatctcctaaaatctcactattaagaagttaatgagcatactggacctatttaagtaatagtgacactgtttacaattttgggaaaacaacaatctcattttcattccattaaagacaaaaggaaataaggaatttcagttagatacatggtaagtatttcctaatggtcaccaaagtgaaataaattaccaatggaggatgcagcttgtgacagaaagagcacaggagacccacgacctggtcttgatggtgttcctttccagttctgtagctgaggcaaaacactttaacctctctgatgctcagttttttcattcgtgaaatgtggataattaaatctgagactcgtgagattgttgtgagtatctaataggatggaaaaaaaagtgatttgtaaaaaccataatgtgttatgcaaaccgaaggtggtggtgttactctctggagttctttgaaaacatcagacatccttggatgacttaagtgtgttcttgcctgaaggcagaagaaagactaaataactcatacttcagggagtgtatgttttcagctcaaattagtattgatggtattaggttttgtatcaaattgaaattcaatggctatttttggaaaggcattaaagtgatgtaacaaaggggaaaatactgggaaagcaaacatgcattttgtataggaagacttaattacaatattgattatatgttaagtataatcaattataaccaataatagtgatgataaccactgtggtttgctattagagcatacttctaataaggcaaaggttattagtttgaatccccagatgggtcaattagcataatgtcaacatttaccccaagctctaatgaggtcatgcaaatatatacctgtgttcacaaggagaataaaatgaagactggaaaaaatggcccagatgttaaaccagtatggatagaaaaaccctaattttagtgcatctctagctttttattttttcctttagcacccctaggatttttgcattttgtaactaattatctgaacttctagttttgcttagcaaattagtgttgtaggtcacttgaaatggtattcctaccttcctataaagctgctatccttctaaaaagtgtggttatgattacccagagaaggttgtttaaccgccagtatgttccaactctgtatttacgagtgcttaaactttgcagtgctgtacttgaagatgaccctgagaactacatacttcttacatatgtttttcggatgggaaaattgaggcttttttttcccccgaggactttcaggtgaagagatattggctaattttattttttttaaaaaaaggtcagtagcacagctggatttgtaatatagaggtcctgactcaaagttctatatttaatttgcagtcttttttttattttttattttttggcttatatgtagtaagtttagtcagaggctgggaaagtaaacattatgtctggatatctagcaagattgatgactacacaattacctctccttcagaagtaaactggttgtttgaaatgacattatttggattagttttagtgataaagtcagttatataatttgatccattggtgtctacaggcctacctacaaagaaagcatatctaagattataattctgattaagttgtggaatttgacatagggtatcctaagaaacaatgtgttctcatgttatggagaaggtggtgatctccactttgtgacctggaggatgatgagaagggttccttgtccccacaatttatctttctctgacaagcctgtttactaaaattaaactcttaaagattccaaccatcttctatattgtagagaagctcattcacaccatcatttaccttagcaaggattcaggcttgaggttttgagggaatggagttaggattcctcttgagcatcatcttagaacaaggtagtaaggggatttggaattttgatgagggaaagaaagggaatatgcaaagaatggcttttggaaagtttagattatggtggtgaggatctggcctaacagaaaggaacacaaagacgccgggtgctcagagggtggggaaaggtgagctagaggatgacagaaagctaagaaaggggaagtggaattatttaaaataaaatttaattcctgattttgcttataggttttcttgttgatatggctttgatttaaagaatgttgtgtgttctcaagaaaaaaatcaattgtttgaatacacgtgattttgtaattttatgtaacattaaaaaactacttacttattgaagacagtttcctaagagatgacatgttctggccgggcgtggtggctcatgcctgtaatcccagcactttgggaggctgaggtgggcagatcacgaggtcaggagatcgagaccatcctggccaacatggtgaaaccccgtctgtactaaaaatacaaaaaaattagccgggcatggaggcgggtgcctgtagtcccagctacttgggagactgaggcaggagaatcgcttgaacccgggaggtggaggttgcagtgagctgagatctcaccactgcactccagcctgggggacagagcgagactcggtatcaaaaaaaaaaaaaaaaaaaaaagacatattctttttgtacaagagggtttctttacttttcgtcacgtgagggtgaacagattacctaatctctctaaattttgttcttttttagtgataataacaccagtctgattatttcacttgattggtgcaaggatcaattaggataatatatattaaaaatacaaactgtaaagtgctcaaccaaataaaaaacattaaatattgtgtgcagtaaaggttgaaggttacatgcttagatttgggagccatattacctacctgggtttcaatcctggctttgtccctttttatctgtgtgacacagggcaacttaaagtttgtgtctcagtattctccttcataaactgtgaaaaataataacacctacctcatgtggtgatgtgaaaatcaaagaagttcatatacatagagggcttaaagcagtgcctggcgtaaaacacggtagtcattctagctgttgtatttttatgtgcatgttagcacaaaactaaatgctgaattatttgcatgggagtgggttactgtgagattaaagaaaaaaatctcgtatttatgcttcaagcagcatagctctttgcttatctaacaaattcatatttgattataagccattagtgacagttaatgaaagggactctgtttgaattaagcggttatgagtatccatctcagaagcttacttctcttgatacttgaattaagagcctattctcattaatgccgacttattcagataaagttcacagtgtttttgtctttttcatcatatttatatcttaagtgaaaggtttcaaccgtaacgacacattggaagcaactgggtccccccgcaccaattcaactggaaaatctgggggtggcacgtagaccttggtattttttataaagatccccaagtgattttaatgtgaggcagaatttaaaaccattggcttagagcagtagtgattaaatatatacctacattgtttagtttctgaccttgatagatatattttgtcatatttaaataaacaaaataatggccaggcacagtggctcacgcctgtaatcccagcgcattgagaagctgaggtgggtggatcacttaaggtcaggagtttgagacctgggcaacatagtgaaatccccatctctactagaaatacaaaaaaagaaaaaaaaaaagccgggcatggtggcacgcacctgtaatcccagctcctcagtaggctgaggtattagaactgcttgatcctgggaggcagaggttgcagtgagctgagattgcaccattgcactccagcttgggcgacagagcaagagtccatctcaaaaaaataaaataatatggctctttatggatgtttctttaaaggcagacctattgtttctattaagtttgtgtcttgtgagtatatgtcactaagcagaaatgagaagtttgattgtttttaaattatgtgtgtggctttttttggcatgatgaagtgctgtgtgtatcaaataagaatatagactttcagaatgtgaaaggtaagagggagcctcaaaggcatctagtgcaaaaggatacactttgaagtcagttctgttttggagtgatttatttacttactgggtgtgtaatcttgtgacacttgcttaacctccctgagctgcagcttcttcatctctgtaaaattgagacatacatgtattttgtgcgatgacaactgtgtttcacgctgcgcgtgcgcgcacacacacacacacagagagagagagacacatctttactctctgcctcctgcctgatccccgcaccatctggtgcagatatccagagcagggactgtgtgggagcctcagcgggactgtctgagcctgcagggccagctgctggggactgcttcctcccactcttcagggatcatttctctggctctgttgggactatttcgtggttggctgttcggatctcatgacctttcttgagcataacatttagtctgtggggttcagtcactgttggtcaagtatagtgaagctgttagtgagactagagatgaagatggctttttgccgccatatgatggaggcttttgggtaccctctcttggtacccactgtttgaaccacagaaaatatgtgtgcaggacactgatggctgcttcctctttccagctggcttcctctccattgctagtttgtgttgatttgggacactaggaggccactatctatgtcttagtttgggggaaggagagaaaaattacagacctcttgactttctttttatgatagtaggaacagtagattttctcctttcccaccctcgtctctttgatcctccagcatagggctataaaattagtaggccactcagcaatcctgttgcacattctttgtatacaaggaaggaagttcatggttgtttcttattagctgtaaagtaaatgcctggggtcttgaccttagctatgatgtttcagtgtcgttcctactcactggcaggcctggctttagtactatcctcagccttaatattgagaattctgcttgtatcactgtctctctcaactgatcttaatgtttcattggaaatatttataaatctggctgccatttttctgaattttcctctgttcactggaattggtgtcaacttctcataatgagaagtatcggtagctttattgattttttttcgatgatgaagatcttgaaacattacacctgtgggatgagttttctaattgaagtctgtgttcctacattagattatgagactcctgagggtaggaaccatgtttttcagcttagcatagccatatctctcatttattacacaccgactgtgtgtcagagatgttgctctaattatttcagtgcattcccataaaaataaggtacacatatgtaacaaacctgcacattctgtacttgtatcccagaacttaaagtataataataaaaaaattaaaaagatcatttaactaaaaaaaaaataaggtacgcataaggaatcttgtttcagaagagcttaagtaaattgcccaaggtcatctagctagtgagtcatagaacttgcttttgaattcagtttgactttaaaacctcttttctaaatcatctttccaaactccttgcagaaaaggacagatgcacataagaggactgggatcttggcctgtagaatgttggatggttctcttaagtaggagccagttatggagctgcattcttaaagaagaggatagacagtctgcatgttttcaaagcccttgttgttcccactgatctacattgacttgcatcactggcatacatggacacttaataaaagtttgttgagagctggaccctaccaccccagaggcagaaatcatctgatggaaggctttggcccgtttgtgggtcttcacttcatgctttttactcaggtcagagaggctgagattatgtgaatttgtctctcactgatcaggccatgggttgaggccttcagacacactctgaaaactggaatgaatccatggtgataagatattcggaggggccagggctgtgttgaagtcagtcttggattgctgaagttaggagatgctgtgcagtcagcctctatgcttgtggtttaggctattagaatgtgcctgcccactttggcaagaaataggaagtgcataaatgctttatcaacctgaagctttgttggatgtgctcagagaacatttctttttaatgtatgtggaaactataaatttaactcctgctgggagtggaagtaattgcttcacacaagaaaaaagctagatctttaaaaggcttaactcctttcacaaatatgtgctttttaatgactgggaaattcctggtacagaaaaaaaaatgtccttttgtacaaatgaggtcattctggtcttaactggccctgtacactctagttcctgctttctgttccatgttttatgaccagaggttattggaaggatcatccctctgtggatatccactgccttttcagtttgttgccaaggggaaagttatcttagctcaggaactgccaagccagtgcaagaggcccagatccaaggggtactgagctagtgactgatgatgattggatttagattggtcatggactaggttgttaaagcatgctttctgtgtgcactaggatcactatgtctgattcattctctttagatttcttaaccattccattgcctcttcgttcaggaatgatttttctttcctaggtgcataccatttactctgctttgagtctgtttggatgagtagaaacatttgtgccagtctgaggcctggtataagtgaaaagcagctgctgaaagaagttgctctgtacctctcctttgaacacttggaagctgattcctcctaaaattaatttgtgaattggtttggctaatgtgcagtaggtatctgaggccttagatttgtgtggtgaaagggttctcctacgtggtaatgtagagtagatctcagtagatgcccttgattcaatttaagctcactttcctctaactttaaccattgcctaccaaggaggatgttaaagattcgaagagtgttaggtagggagagtgttacatctgtcttggatgtttttatgaagaggtggacatggagtgggtctaagtgagatttgacatagacctctggtgtctttttttttttttttttgaggcagagtctcactcagtcacccagaatggagtgcagtgggggtgatcttggctcactgcaacctctgcctcctgggttcaagcaattcttatgcctcagcctcccaggcagctgggactacaggcatgtaccaccatgctcgcctaatttttggtacttttagtagagacagggtttcaccaatttggcaaggatggtcttgaactcctgacctcaagtgatccacgtgcctcggcctcccaaagtgctgggattacaggcgtgagccagagtgcccagctcctggggtctcctttagacgatatatttttaagacagccactttgaaggattagcaattggaaattgatacttattaactgcttcttaggtatcagcactatgctagaccctttctgcagattgcctttttagaggtagaaggctaccatgctgcctcacatcttgaagggtttgtattacattcgtattccccaagaattcatccttggctgtaatggatcaatgctttgatgaggccttgagtgctttttttctgcttaattgactacaggtttttgttatttaaaacattctctctcttgctactgagaacttggttcttcttatcataacttcctaataacatctaggttctaggatcttggtgtcccattcatggctctctaagtctgaaactccaagttcagtctctgttgcttaatttcttgatctgggattaagaacctctgtcttaagccatcgtggagaagagattatgaaatgtggtcatgagctgcttagatatttgttgcagactccatattttgcctgaagcacttgtggcccatccagtatgctccagaaagaacctttgcttgaattctcttgggacatggaggaagtcaggctgactgctgtgacagtcatggctgtggggccctggatcacctgcttcccatcctactctgcctttttgttagtctcctcaaagaacggggaaaaaaatatcatttaagtttaaaaatatcttttattataaagttgactcttttaactcaatttatcactgcttgctagaccatccttgaaaaccttgttaaaatgtagaagaaaatatgaagacgtgccatttgatttcagttgctcattacctcatgcagattacatatgctggaaaggaaaaaccgtgactcatgtttctgcagggcaccctccctgctatccccagggcctgggtttattgtaggcagccaatgtgtattttattgaacttaatagctgttacaaaagaattgaagaaaacattcctaggaaatactatcataattgaaattgggaagttctgggtaattgccgagtgcctcatattagtttctgtggggaaaatacatggcatgatgcaaaatgggttaatactgtagaaggaaaactctcaagagataaatcagaagcttcacctgtctgcctacgatactcacagtgggaatggtactgatttgctgataatatgtttttattattattattattctgtagcctcagacgatacagcagactctcaagaggacactgcagtattatgaacatcaagttattgggtaagtaaaaattgatttcggttattattggggacaaattaaaggtaattactcaaacatagctgttgagtatgtgattttctgctacccaggtcaacctgattttatagtggctatgttttcatagtgtggggcgtgaaggcttattgggggagtcccttggagtgatttcttttggcttatttgtgcttaattcttttaaatgaaattactttctggtattgcttttcttttttttctcagtcttctcatgttcttactcttttattccgatgttgaatcatataattatgccttactaatgtggtgagctttattggtaccaacccagatgctttgaatgggattttagaatccttaagtagagtttgataagaatcactacagccttaacacagttcagtgagaggaattagtttacttagagtcacgtgctacatatttttctttattatcatctatttcttgaagtggttgtgatgtggtgtaaagtaagaagacttgatgtcaaaagacaggacttcaaggcctcactagcaaatagatcttttactaagtaactttatctcttttttaaactgtgatgataataataactaaatcaaggattagatgtaatgattaaatgaggtaatttcaatgaaagcattttgtaaacagagagctccaaatgagtatgaggtacacctctaattggctgtggcagaaagcagctggcaagtatgaaagcctaaatttacctactcatgcaatctagcttttagattaaatttattgacattagaggcaatgtatatattttaatttaccttgttagtattctttatatggtacagtgatttatctttgtaagattttaagaacttttgagaagtcaagattcaaactgtggtacttcttgaactgctctcaggatcatttaacatttatggctaatagccattgccatagggatcaataacataattttgattattacggtatagtgtgatttttttttcacagaacagaagggaagaaatcttaatggaaaaataatctcggtacctagtacaatgccgtatactttaagtgcttgatgattatgttaattgtcatttaaaagggaattgctttgaaactttgtcatacttatcctcaagagtgtagttctaggaaaaacatattatttaaactcatgagatggcttttagtttgaggccattagtgatttaaaatggtttatcctaatggagataaagaatgtcaaattaatctttctccacatatcctgaaataaaacttaatcactctcattgaatttgccgctttccaagtatggtgtttggattaaattagttagtatacttaaaatagttcctcgtatgtggtgagcactacatacctgtttgcttttatgtttatcgttattattaatatttttatgacaatatccatcatcaaagtctaattttctgggattatgaatgctctttcgctttcgaaataaaataactgatgaaatattctcatttttgaactaaagtataccttcaaggcaaattggagtgggactcttataatgtgatcaaaatagataaccaaactatattgctataatcagaaaagttttttctccattgatagaatggagggagttcccttttatccagctggctgcctcagccctccccttctacctatgtagacatggtctgtggtgcttctttgtctattgcatgaatggtcttttcctagttctgtttattgcatacacagtataaagaaaacagagagtttgactccagtataaagaggggtcttgatgtctggcatgattcaaataggcctattaacatatttttgcttgggtgttggctgatttcttggacttgaagtacctttgctcactgactttatttgcattcatgctgatgcagacaaagggggcctgttggcagcaattttgtcacgtttgcctttcttgactgtattcccctttcttgccttttttctcattgatgactttcctgtccaacttcctcttttgccttttattctccatctttctactttctatttctcttttcacaatcaagaaagcagagcagctaatatcactcaccctcgaactaaaaagtgtttacagctgtatgttgttcctcttaagaaaatacaatttaaggcttcctatctctaattgtgaaaaagaatgtgtttcttacagttaaagggattttgaaatccctgtattgagaattgagagtaagtgccgacaagcataattttagttattttttggcaggtgagggtgggaaggagatgcttttcctaatctctgaaatggggcttgcttaaagctgtcttgaaataactcagcatttaaataccttgtgttgaggtgttgaagcagaacaggtaacagagtatgagctagcccttctctttttaatttcttaattatccttcaaccactaaccttcttttcctttccttgaaaactctgcccttaatctgttttatttatcagagctctaggattgtacggttctgctccttggattcttatactggttgcccatagaaactctctgaggctttttgtgtctgccaagactgagacttcaacgcggagagcagctgtttcgaagggtcacagacagaaggactgggagggagtagctgatggggcttcctgttagggagtaagatagcctctctgtactttatccactttatctttaaacattattctgttccttaatttatccattcacttgttcatttatttattcatagagatcattcaagttggggaaatgagtgctaaaataatttattcatgcaatgtgataaatcttctcttcatctccactatcgtcatcatctctcaccaagacattctggtctaattttctggtttctacttttgtccgccaatatgtattttcaccacagcaaagcaattaaaaaattacatcatgccaccttcttatgtgaaaccaatggttctcaaatgttaatgtgcatcagaatcacctgccagccttgttaaaacacgtattactgggccctgctcccagaggttctgatttcctaggttcagatagggctcaagaaactggcatttctgtcaagttcccaagtaatgctgatgctgcttgtccagggatcacactttgaaccccctgctttaaactatatgatggcttattatggtagaataaagtctaaattctttctgtgatctggcctctgcctacctctgtaatttcatccctttccactttcctttttttcactccatttcaaccttctgttggtttctcaacttaccaaccttagcttcagggcctttgtatgtatcgtttcattcttatgcaatgctctttccccagatgtttgcacggcttattctttatatacatataggtctctgttcaaatgtcttctctacaggaaagcctgccctgatcaccccgtctaaagtatctctccatcacctacctcaaactccaatcgtgtcaggttgactttgtggaaaattttgattactatataaactctacatattcatgctcacttggagagcttcttgttcccatagcactgtctttcctccacctagaatgagcaagggggcattgaatgtgcatctttatgttagttgctctttaactcaaacttctagggaatggactaactttctgggtggtgtggggtggaaagattagtgaggagcagaagaagtcagtagcagacaggcaggattcactttagaaattaaaagcaactgaggatagaggaatgtctgtttataatggtactttttttctgatataattcttgccatagtgccctttcttctctttgtatgttgtggaaagattgtgttttgtaagtagacatatgaaacttactagacatatagtcaggttttgctatgaataatcttgggaaggttacttaaaatacctgagcctcagttttctcattttaaaaatgggaataataacagggttgtggtgaagtttaaatgaaatcttaatgataataatgtatgaagtcatataatcacataaagtagttagcatagtacctggtacacaaagataatcaataaatgaattgaattattattactactgttagtaaatgactcttttgcaattcaacttttgtggattgtcttcagtttatcctcctgctgcaaccttttcctgtcttccttgggccttttaaagtttagaatctgttgtttagcatctggtggtgaacatgcccagttcgtgttctaactgcagttttcttctcacagagaacatctttttcgttgatttttttttttttgactgaaatttctgtctctagagggcttgacccaactgctctcactcatatttctactacatgattcctactggtctatggctcacaaaaatggattgccatggcagggtagacgaagcacagatttcttcagtgaactactatgagagatgtgataatctttctgagatatagtgttcactcactatatattttaaacaataaagaataaagaaatatgtattcagaaccatgccagtaattttatctttttttttttttttgccagaataagcattgctgtgttaatatcatggataggactgttgccaaactcatattagtctgggacaccaattcttatagtcatctaaaattaaattgtattgctccaattattaatgtgggccctatgtttgttttatacagccaaccttctgttctctttttcttttgacaattgaggagaaattaagccagaataatttcagtagaacactagagtgaaattaagaatgggtgaattctgattactctgagaaacaaacttcaaggatattacttaagctttcatgatcagattttgtggcttattttaatctaaaaatgatctagcttcttttttatatatttacatagaaaaaaactgtatctttttgaacataaacaaattagacaaaagctaatatctcttgattgcttactatgtttgaggagatatgctgggcactttccatcttttatttaatcctaaaaatattgcataagagtactgtattaagcacattttacagatgaggaaattgaggttgagagaaaaaagtacttttttaaggtcattctgataaaaatggtggaggttgaattaaaaataaccctgtggggttgcctgtgtttaacatctgtgctccctgttccacctcttgagtgactcctgcattctggaaactgtagtaagcattttgcctaactggtttattggagtctgatctcaatgaggtgtacaaacatgaaacctttttatttttccctccactcacatcaagcatgctaggatacatccccttcgatattagcttagacagattgctctgttttccaagtatttccaagaattatgaagttcactctagaccaatttaaatttttactctcatatctagtctgactctaatgttgctttctctgtctgggtcaggacttggcctaagagacttggaatacaggacagagtgtatgatgtgggttttcactcctcttctccaggccattcttttctgtgtccctttctcttcggatgtattgggtgaggcatgaatgaaatggaaaatggaaaatttcattggggttgtagcagtcctctcttggctgtcatgccctcactagggtgcatgtatgagttccgccctgacacttttggatgccccagctcctgcacctaaggacttcactctcgtggtcttgctagtgggagccctgtccctggctggcagcctctagattggaagagcaccatgacaaccagacaactcaagcttgcctctctcttccctaacccatgggaaattcacatatttgccctgccaaacggtgggcctttaggttgctcccaattttgctctatttcttttccttgtcgataactttctccagagtcttcttcctcttatcagtcagacaggggagtatgatcaggaaatccactgcctctgcagatgttcactggggaatgagatgggtaatccccaatctctaccagctgtggacccccctcaccaactggacttctgcagggaacactccccttttctccttttctaggaggggagggggaaaagtaccatagcactctcttcctaggccaactcctcactcttctgaagattttattttgaagtctttctgttcttttgcttctgtaagctggtggtagagtgacaggggcagtggctgtttagtctcctcttaagtcctgaagaagagctctggtcttcttggctacccctttggaatgtgggaggatttggcctttaatgtcctcagcttttttgtcttagctctcattcagaggcaactcaaaaagtcccagccaatatccagttacaggcattgtgttatttagtcctcacaagaactctagaaggtacctccattttatgagagaggaaatttagactaacagagattaggttacttgctcaagatctcacagatagaaaatggtaagaccatgactcaaattctgccaggtgtatgttatttatacaccatactgctatcttcttctttttttttttttttttttttgagacggagtctcactctgtcacccaggctggagtgcagtggcgcagtctcggctcactgcaagctccgcctcctgggttcacaccattcttctgcctcagcctccagagtagctgggactacaggcgcctgccaccacttccggctaattttttgtatttttagtagagacggggtttcaccgtgttagccaggatggtcttgatctcctgaactcgtgatctgcccgcctgggcctcccaaagtgctaggattacaggcgtgagccaccgcacccggcctatactgctatcttcttgactgtgacaaaagttatggtgtgtttactttcaacaccattgaatgccaggacaccaaattaacattgttaacttttccttttctaggcagcttccttatagaaacagatcactagccttgatgaagtgctctcagagtgatacattagctgtacaaagctgatatattttttgttctcttcaatttttttcacacatagctttcttgttaacagttgcctccagttccaggtctacactgcaaatgctgatgtgaatggtgggttatgccagaattatgtctcaaagcttcacttattttaaaatgtgactatgatgaaagcatagactgcgtgtgcttgtgcgtgtgtatatgagttgcattcgcagatgctttcaaaaatttctccttatgctaattttgttttcttcttagttacagggatgcagaaaagaatttccacaatatctctaacagatgctcctatgcagaccactccaacaaagaagaaattgaagatgtctcaggaattcttcagtgtactgctaatatactcggtatattaactatatatatttatatggatgagagagaatgaaagagagggaaagtcgaggtggaagtgtttcatgttctaccaaagagagatgtggagaatatggcaagttgagacccagaccttgtgaagtgatgggtgttaactctcctgaagatgtttgagtggaaattgcttgcatgccacttacttagagatggaaaaacatcaaaacaaaaatacttaaattccagggaaacaatttcagatattcacatgtgaatagtattagctctgtataatccatatttctttggcccttattctcagctaaagttgtaggatctttttttcctctcagtcatactctattacttctgggaggtcctggttggggcagaagggtggcccacaggtactgttaacactctacaatccaatgttcctttctgtggccttgtcagtgaagcaggtcatctcctgaggtgtctgtgccctacttggggttaggggagtgtccatcttaaagatatttgtacttatgacagaggggctgtttttggatgctccaacatggctaaaaggtactgttgtaaattgcagccaattatacagccgtaagctaccataactgagctgtactaccatactacctgacgttcttggtgtgtgagagctacattgtattccatgcaatgtattctaaaagaaatattttttttcctaatgtcttacagatgtttctagtgagaaatttctctttaagttctttttggaattcttttttctttatgacccagataggaatccatggggtgctggagggtgctagtggggaataataaatcttagtgagcgactccacacagaatgcagaatctcttttggggtcaggtgatggacaatagggcaaaccagtttgcatgttctttcttttcctttatagtattttccctggaggcatctgagtttctcctacaaacagtttccaggttaccccaacccaagggtctatcagattttctaaacatgtcagacttctagaggtagacttcttttacattcaagctgggaatccagctgccggttggctacattttcatcctaggtaacttttgtaaacacaaaattgtataataagaaaatgtataccttttgtgaggggatgcatatagatgttagtggtttgtctataacagcatgcaggacagtgatgggtagtgaaaaggaggccaaagattcatcaccttaatcttagaacaactgcagggatgtcacaatacccaagtaaatcttatgactggagaaaataagggatgggattaaaagagacattacccaagagttgtttaaagttttctgattttatattttcaaggactctcctttcagtaacatacatttctcttaatgcattgtgatttcaaggggtggggtgatgatgccacactaaaagggatgtatcagaatctcagtgaagggatgtttaatattttgagaagttgcttcttatccagtttctaaacactttcctgaccctcacgtctttcttctttatgctccctatttttagaatcactgagttagagggaataggaggtgttcaaagataatgattatattggggtgctaaaggcagttggactgtggcttgtaaatgagtgtgcacaattcccacggagagaaaccctgggtcaatttgaaatggttttcaggggacactgttggcccagcacagcttagttgcccttcgaaggttgccctaagatgttggataagtagtgagtgagaagaacagcaggcagtgtgctgcctgatgacattagggtgagtgcagtgtttataacttagaaggtgatcatgtaacagggtttagatttccatgaatagtaactttttctacaaaagagatactaggtctgattattttcttcctctaagtaatgataggttgttttcaagatttaaagcacaatcttgtaaagtttaaatttctgaagattaacattaacattaacatttaatgcctgccacctgtcaaccagatgctggcacagaggtagctgttctccttgaataatgtctttttagaactcttgatatattgactctctgaggacagcgttagcggtcatattcaataaaagctttgtttttaagaagtcactgagctatgattaatcttggcttgtttagatttttatctttttttaaagttgtgtttaaattctcttctgtaatcatatatgagaatgaaagaattggtcagcttactggacagaaaagcatgacataaattgttttttgggaggttgttggggggtggcacaggaaaacaacatttcaaccaagataagaaaaattttgatgcctgggaacctttttttttggatggcagaaggcagtgttccaactccatggtttatatttatcacctttggggagtgtgattagaatattggtggactgagattggcaaacatatatttctcttaccttcttaacctattacagggttgtattagagtctggaaatgtgttcgtttattcacttatttgtatattatttatacttcatcatcaaaaaagacttgaagtcatagatcacaagatatgatcatagtagcaatttttctccttccaaaatgagcatttctacctacttagtataaacaactcctctagaaagtttggtcatttactggctcttcaggttgaagtttgcatttagagggtggcatggaataaaaacgaggacctgaggagagggagaaagtgagttggagaagacctgttatgcctctgtcactcatttgttctctcacctcttccatgggactccctgggagcacatgttgtgccctacaaggtgtttcatgcctctggagtaatgggaaagaactgcttccagatatcaaaatgtttgatgtctgtttccctttcgttggtttagaaactggttgtttctattttctgtctcatcatttacaaattacggatattgattatggtctgtttcttgccatctcttcaccatattttggtgctttgccaattgctgtgataatggaggctgggcccttgaaactctggccatgcaaagaaagatagtagacagtgccctccctgctggaggactttagagttaaatttattgctttatttggtacataatgtcttttgcataccaaaatgatctaattttagttgtccaaaaaatagaaaatcttttctagccctaatctgcaaagcctatttttagctcaaattaaatagtagaaatgtgtttatgctctatgaggcaacatttagtattttcttggaaattgtaatggttgaatggtatgatgaagcatgtattaaagcatgtgtaccatgttttctgctgaaatgttgctacttgttcttatggattgggtttacatagtgttgtaggcagggagacaaagtgagtaggagagttaagggagaaggatgataaattgcatagtctcctttgtcataataagttaaatataaatgaggttatgactatttcagttttaacaagttctaatactattaagggtgttgtgggtgtttcagttgttgtagagctttaaggagctaccagatgggggagttggggtgtaggaaaaagacttcccacagtagtttagagaacaaatagaaatgagagctctaggttaattcatttactgaggagttatagcatataaagatttgcaggtttaggaagcatcagttatttgctaagtattgctcaaagtatagttttatactgcccttgctaagtgcatttcctctcaaaatagtcaggaagtgcatagttctgaaaagatattcattgatgttttctctgttttaaaggtctctctctgtcagagtgttgctttatcttctctaaaaatgtaacacatttaagtcagaatgggagcaatgcttatcatgggattattttattgggagagggctagtaaggaggatagaggaaatgacctttggggcttattcctcacaatattttcttagtatcagggatcctgaaatactgtgaaatcatttataagatgccactgattccacaatctttagctggtatggaactctctgtttttttataagtaatgattttttgcttatatgtcaacttgtatatacttttttgtttcactgtgatttgtaatgtgtatttaggagccttttaattagtcataaaattgtgaagaattagcttaaggttaggttaagactaacttggagattttctgggaataactctaaataatataattgtttagtagataagaatatgtttaacatatttgttatcttggagaactagttagtgtagtaacaacttaccatatttattggtgagttaagattaatagcaataaataacttctgccattatagttcttgttactataacttggtaactgatcaatttcctctttcattaaaagtaaatattttcagtattttactagaatgaattggaattaaggcggttgaaggggaaataacttaataatgttactataatgtagtgatttagagcaagactggagccagactacttgggttgaaaatgcatctcagctacttactagctgcacgaactggaatgatttacttcatctttccttacctcatatttcttatttgcaaaatggagataatataattgcacacttcctagagttgccaagacgattaaatgagttaatttatatcaagtacatacttagaacagcatggtatataacaaacaaatggaacatgaatgtttgcttttattattattgagtattccccaaataatgtttgcatcagatgcagaaggtttgcttacttttttaggtgagaaaactgatactttgcaaggttaactaacttgttgatatctttggtcagagttaacaagccacagaggcagaatttaaattcatttcagtctgattccaaacctcatgttcttctcattactttgtgctgccttccagagttgttgactgtgtcatcactcctctgatgctaattacacaccacctttccagttctctgaattcttagaatcgtcatgatgtcacattttgcttagtgctttgctctttcaaatgtacttgggatacttgcttgtatgagacaaacttcttgtcagtattgaggaaagttcagttgtgttgcaatttggatcatttcagtttagaaactaggattgttctttagattttaggtgttgaaaatgctaactaagggtgatggtgtttcccatcacaacacaaacgtggtttcatagctatgctatagtaaacactgtgacagtttttttgctcatatttcaagctgatcttgctacgtagctggcctcatgtgttagacatcattaggccagcacaaaacctgcaaaaaggctgtgtttctgatgttgttgatttcttttaatggaaaagtttaagaatatcatcatataatcttattaaacaattcctaaacagagactttaggtagtggctctgtgtaaattagagacaacttctgtattctgctctctgcttacatactttccctgagatagttagatacagtagatagtcctgagaaagaatgagaccattgtatatggacactgcttcctatatgtaaaggataaacactataatacaaacatatccttaagttatacaagtcagttttataagttacaaggatattgagtatgtagccttttcgctggcttcttttgtttagaagtgtgaatttaagactaatccatgtctttcacagagagctcattcctttcccacaactgccctgaaaaatattccatttaacatgtaccacagtttgcttatccattcattgattgaaggataccttgattctttccatttttggttattggatattgagtggaatgtggcatagtttccctcttctcctagatattttttctcttttaggaacatcttcttctgaatcttgtgacagactatttcccatttgtcctgctaaatttctccagacatagcttttcttttttgctggaagaacatggcagtcctttttcttaattttaaatttgtgtttctgtgtctctaaagcattgtttcgctatcactagcagctttctgtctagcacctcttctttgtgtgaagggagaacaacccttcagattcctaaattcttcaggttgtcttttgttctcttttctgaactcttcagtaggttggtgtttatttttcgtttccctttaagttttttttaaatgaagttttaatgtagttttaggtttataaaaaagctgtgaagatagcacagaaagttatgatatatcccacacccattttccccatttgacatcatacattaatatggtactttggtcccaatttataaaacaatattgataggttattattaacaaaattccatgctttatttcaatatccttagtttttaaccttttcctgttccaggatttcatttcacattacatttagttgacttatctccatagcttctcttatctatgacaatttctcagacttatgttgtttttgatgaccttgacagttttcaagtgtactggtcagatcttttgtttgtttcctgtttgctttggtatgtggcaatatgcccatcattggcctgacatatgcccatattgtgtgtgtctgtgtgttcatagtgtgttttgagcacttccttacttcccagcactataagatgttccagactcatctttcatactttctgccccagttgtctagaatgagccatttctctcaggagccctgataccttttattggagaatggtattggaaaccatgacctgggcattggttgtactcattgctattggggtgttttgcttctacgccctctcagctgacagagcaagagaatatatgtgtgtagactaactcatatatatatgcccatctataaacatttttatatgtattcatcatatgctaaatatgagttaatactgatgtctccaactttactccattaccatatggatcattctaacctttccctcttgcttgtctatatccttctttctaacaaggagaaacctgactccctttagccatccatttactgaattcttcaattccagtgtacgtttatagttgtttcagaattgttaacagaaactcccaggggaaacaattttatcaactaaaatacagtgcctatgggcagtttgggagtatgtagttatgtataaagctttatagtgtccactcatatccagggttacttaggtaagcacctttctaccccaccacttccagtaagatttttttcatatatttgtaatacagctagattcttttattatagtcttccatcctgtgatactttgacctcctaaacacacacacacacacacacacacatttaaatttgtatacagtaagtttagctcttctgctgtaaagttctatgggtattgaaaaatgcataatgtcatataactgccattataacatcataccaaatacttgcactcttctaaaaaaaatcccgtgtttcacttgttcaaccgcatgtcacctccaaatccctggcaagtaccgatctgtttgccatgctatagttttgccttcaccagagtgtcatataaatgtaatcatatagtatatagccttttcactggctccttttgtttagaaatgtgaatttaagattaatccatgtctttggcagagagctcattcctttccccccacccccctgaaaaatattccatttaacatgtaccacagtttgcttatccattcattaattgaaggataccttggttccttacatgtttggttattatgaattaactgctataaaacattcacttgcaagtttttatgtagactacattttcaaatcagttaggtaaatacttaggagtgcaattgttggactatgtttaaccttgtaagaaactgtcaaagtgtcttacaaagtggctgagccatttgcctttccaaaagcaatgaatgagacttcctattgctcttcatcctttccagaaattggtattttccattttttagattttagccattctaatacatgtgccttcctccttgaagttttaataaacaaaagcagcacctgttatctctttataatttctgcatataccaattataattaagaattttgttttctggttttgtcattctaaatacttttcctgatattatgactgaatttagaaactgcttaaaaatttattagtgatagcaatgattgcccatgatactactgtaataggtagactctttctcttttgcttagtaacaataagttcctggaatgaagttattcagcatttattcactgggaaatgaaatattttaggaatttcagtgtaactttgaggtgatataaccaacagggtcccatttgttgaaggtgttgaaatataagatgtccacaaatggtctttgttaatatcgttatgctctcctaacccccagcttgcctgagttaagattcctttcaacactatcaacagccagtgagtcaaactcacttaactaaagctcctttactcaatacattctcataacaaaattctcaaatttcttagaaactcttctatttttgttttctcaaagatagtattactgccatttaaaatctgcaaaactccttagttggataaaacaaaacagaacaaaacaaaaacacttagctctgacttggagcagaagaaatggaagcacagctaggtcaggctgcttgcatggggtcacaccattagcctctggggagggcagtgtttgaactatgaggctgtgatggtagagcctgctacattacttattgacccctcaactgcttctgttaccaaacagtaattgttattattgctttttctctgagttagaaggaagattattcttcccttactatgtgagaaacatgattgtgggcctgtaatcacttcatatgtcaaactcatagcttattttgttgccatctcatggagcagatttatagtgacttgtcacatttgctttttgaaatactgtttttttttgtctttatttctttgaatcttttagctcaagtgagcataccaccttcctttctcccccaacccttttcttttgtgttagaagacttttgttaagtaaatgaattatttcccattcatgaggctgatgtttttgtccattgtgttatctctctgctttcattgttctttgatgcataactctgactcaactacaaattttaatagcattctgtttaattcttctgacagttagtgaaaatttaagtaagattagagttaaattcaaacatcctgggttctatgctagatgagttgttgttcttactagtcttgagttcggttcttcagtcaattttaagtacttttgacagcatttctattgtaatttatttaaattaatctgatgagtagagttttatgtgtcacaataaagatgttacttaaattaagacattttatatatggtaaattccccttatgatcccactgttagtcccatttttcaaaagcaaaaatattaatctcttattttctttgagtctgctcagttaaagatttccatatgttaaattttccatcagggtagctatggactcttatgtatcatgggtgatttttataggtgttttggagtgctcttttcccatttctgttactcatagtagtacctaaagtgacatcttttcaaatctaataagtttgagaccaaacttccaattcctggtctgttgtggttttttcctatatttccacaaagtctgatcttaaccttgagaaatggtaagttttctagtatgaagaaagaagttgtagataggatcaggttgggtagagagattgttgggtggtagggaatggtatgggatgtgaggactaggcttcatttcccaggtagaaaagggcagttagaagaaccagtgtaggtccccacagaagacatgactcattgatggaatggagggagaacctccagtgttggtaacaggcatgaaaataaactggtagagcatatatagaagtcaactaaacaagaaacgcatgtgattttcataagcaaggatactgaagtaattcctgactcctacataatggtcaggattgaacattgtccagagccagataagtaaaagaggaaaaaccaactctgaaaatatcaattttaattttgatatttatacatttatgcttttattcttcctagggaaatatgattgcattattgatttgaatcctaatcccaaaaatgcttatgtctatgctagactctagatcagtggaccttacattccacaagtgattgtacagtaggatcatcgagagacattaagaaataaaagaggcctatagacatgatacccagatattttgattaatcatatctagggcagagaccagaactttgtattttaaaaatacattctctagataattttagtatgcacccatgacttttaacaatttaactccaaggctaatcctgctcttgggcaaggatgcttaagaaactgtagtcaattcttaggatatttgataccaagtcacctctactgttagttggtactttaaaatcctgtgtttctttctgtcttatttctgaaagtgggttgttgccttgtactccactcaattcttttgacttattcctacttctcttcaggactttagttctatttctgaatcccacacaggaactggtgctctgctttcattcattgctttttgtcttccagatacatgcttaatgtctcttgctagatgctctgtatttatcttttgctagatgttctgtatttatccctccctccctcccttcctgcttccctccctccttgcttccttccctccctccctccctccctcctttcctcccttcattccttccttccttcctgcctcccttttgccttttctgtatctctttgccaaatctccttcatgctgataactgctggcttagattactggcttagactgccatcatttgcatcacccaattagaatatcatatttttttctgattttctcctgtttatgtataagtgggcatacctagttctagataaatccctccctttattcatcccatgtcattaattccacaatgacatgcaatagggttttgttcaaactaatgtcagaaatagtgggtcatgcattgttttcataaaatgcctggttactgctagatttttttacttgagagctttagataacactttcctgtccactattactattgttaggatcagaaatcctattaattccgagaggacagtgttaccctagggagaaaataaagtgggcaatagaatttgttgctgcaataggaaagggaagtttatacttgtctgtgagctttcataaagcagagtcattttaggatctttgcgaagaagatatcaagggatttcagccagagaacaagcagaacagtgacaaatgatcctgactcttgtgagttactccactgagcgattagtgcccaggaaaacgttgactgaaaatacccaattgccataatttttctgcttttcattctctgtcttctggttctgtgtacttccccacaccattttatgagacttcattcacctcttcattcacttctagtacctcagactgtttttcattaacctcttttttttggtttgtttctataacctttctattttcattattcttattctcaatcttacattttaataaaaagcaacaattcaaatctgccaaacgtgtttacttctcttaatttgtcagtacatttttgctttagtgctatttttaagcttaatattccagttgccaaatttagtagtcaagcaactctaacttactgcaaatttatacaatttctttaattcagagctctaaatgatcactagggtttcagctggactagtatattgttatattaactgcaggaaaagattgattaatccacagacgtctgtatataatattgtggaggaaatatttgccctattaaaggaatagtttttaagtactttgttccatcaatacaaatatttattgaatattttgtatttttgggtactgttctaggtactggtgatcatcagggagaaaacagcaagtgggcagccaggcagtaaaaaactacagacaagtaacaaatacgaaaacttcagagtgatgcatgctgtgaagaaaaataagacaatggggccgggcgcggtggctcattcctgtaatcccagcactttgggaggccaaggtgggtggatcacctgaggtcaggagttcgagtccagcctggccaacatggtgataaccccatctctactaaaaatataaaaactagccaggcctggtatgggcacctgtaatcccagctactcaggaggctgaggcaggagaattgcttgaacccaggaggcagaggttgtagtgagccgacatggtgccactgcactccagccttggcaacagagtgagactctgtctcaaaaaaacaaaaaagaaaagagaagaaaaataagccagtggaatgtaaaagagtgtgaagggcttaaataatatgttaacgataatattcttaaatccatttaagcaactcataggatttctatatgactgtagtatttgtgctgtttcactgatatttctggatttagagctccagaaatgaacttttttttttttttaaccttcactttaatatggaggaggttgaggttaatgaaagttctggtttctccactgatgtctgagtagcatttgctactctggatttatttaagatgaatgaaaggagacagtgaggctgtagcattgtattttgggctagacaaagtcccgagtggtgttcatcatcccaccagtgtgttttgaatacctccatgtgccaggcctgtgctggccatgaagatttgagagtgagtaaggctgatgtcgtctctgctgtcctggctctgtcagcatagaagctaatgggaaggccacatggcaggaggtataaaacttttctactcagtggacagaatgcaaagctgcttgagtgtgaccactagaagagagccatcccaagagaagtggaagtaaaatccacaaatcaaatgcatacttaagctttctcttgctgttgttttctttttctccatatacacacacatacacatatatgcctatatacataagtacatacatacacatacatgtatacatatgtatgtatacacatgtataaattatatatgctttactatttgtaaggatttttcatgtatactattttgtaccttgctaaagtctataattaggtattattatttccattttacagatgaaggaattagacccagagtgtaagtactttactccaaatcgcttagccaacaaatgcttgcagctatatttgaatatagttttttaaactacaggaaaggagtaccgctctttttaccatgttgcatttttctctgtttccaaaaataagtggtaattgtgacacatcttccattaaaagaaccacctctgtttcctaaaaaaaaaacaacaccctgtgtttatgtattagtatatactgctacatggtactgtatgttattttggccaactccctgaattaaaaaatatatatttttctttttttgagatggagtcttgctctgtcgcccaggctacagtgcagtggtgcaatctcggctcactgcaagctctgcctcccgggttcatgccattctcctacctcagcctcccgagtagctgggactacaggtgcccgccaccacgcccagctaattttttcgtatttttagtagagatggggtttcaccgcgttagccaggatggtctcgatctcctgacctcatgatccgcccgccttggcctcccaaagtgctgggattacaggcatgaggcacctcacctggccaaaaatattttataaataccttttgccaatgattattctgtgtctgtgctgccagagtgagcactgacaatatttattctgggtatgaaagtatttttctgactccaaatgagagatagaaaaacagatctagagagcaagggttttgagctgataaaaataggaggaacccagcttatacttctattaatgcacacttcatgatgtgcttcctaattgtttacatgtctttctctttgacttgaatgtaggtacctagtggtcaggtacctacatttaactctttggggcctatttaactctttgtaaccacagcaggaaggccagaggccctggaggggtagctatccaaggattattgtttgaaagacaaataaagactgaggagtattcttgaagaaaggaaactaaagacacaagaaaaacaaatgcaaagcatgatcctgtactggatctcggactaggaaataatacaactataaggtatatcattgggacaatgagcaaaatttgaatatagattgtgggttagaagatagtattgtgtcaaagtgtacatttttatacaaggaagtattagggatgaaggggcataatgtctgctacctactctcaaatgatgtgtgggtgtgtgtgtgtgtatacgtgtgtatgtgtgtgtgtagcaaaagagaagggggaatgagagagaataagaaagcaaatggcacaaattgttcacaaatggtgaaacgagatgaatatgagaatttttatactattcttgcaacttttctctaagtttaaacttatatcaaaataaacatttccaaaaatgattgaataaagttaaaatatattataagtccaaaggaactttgtttttattgggttgtatccccaattaaaaacaaacggacatcaccacaaaactaactaaaataacaaacataagtgagtttaagagtttgcagcgtatttttatgctgctataaattcctagtatcacctatgaatgcatcaaattctatataattagtgtccagattggagtctatctgtggagtttattttccttaagttttgttttctgtctcccttataacgtgatttggtgatatggagattaaggatgaaattggaatagtgtctgaacgtagtcccactctgtttatctcctattgcagggcaattgataccagaataggtgattggttcctgtatgttccagaacatttcatttctttcttctacacagaaaaatattgctcaagaataaaatcacattttcaaagaataaaagtaaaaataaaactgctgactacttctattgcttaaggtaccgattttcatggtactatattgagtgacatctatacacggacatgtagctttcttcttgtcatccctttactattatgataattttggacttcccaaatactttccttgaattcagaagcctcatcaatcattgacatattctcctctgtagactctgatttttttattgcttccctgacattttaaatagccagtatgcatcatttttcatggcctgtcatcagtcattagataatattgcaatgtgctatcaaagtatttctatatttagtagcagtacattctgtatctccatatagcattgtgtagaattagttacacaggatcttcacttaaagcaggacatcacactaagttggtgtttagtgtttactgaactaataggcgtgtaaagtcaactgtttagaagataatatagctgtacatggtcaaaattattaccactgcctatatttttaaattaataacaggtcagagcataagcacatgatggatattcatttccctttttgttggaatagacaaaagatcagtttcaaaaatggtgttcatttcagattatacatatatgtgtatatatattttatatatatatataaatatatataattccttaaaactttaattgttgcataaaaatactgaggcttatgtaaattattctcacatttcaaatttatttgaaattaaaaattttaagcaaacatatgcaggacataatcaggtattctgtctatgtgatttaactccccccacctactcccacaattcctgcacacactcatatacagactttcatttctagtttttttttttttttgagatggagtcttgctctgttgcccaggctggagtgctgtggcatgatctcagctcactgcaacctctgcctcccgggtttaagcgattctcctgcctcagcctcccaagtaggtgggactacaggcacatgctaccacaaaaatatttgtattttttttttttttaagtggagatggggtttcaccatgttagccaggatggtctcgatctcctgacctcatgatccacctgccttggcctcccaaagtgctgggattacaggcgtgagccaccacacccagccccatatacacattttcatgctgtcatggacctcatagtcctgatcctttgggaacaaaattttcaactaaataatagaatgaatctagtcctgttaataggaggcaaaaattcaagtaacagtggtattcactgaccattgttcctgctctcaccttagtataaatgttgggaaaataggagggatttgtgggatggagtaaatcttggtatctccacataggaactttattggacttaactttattcttatttgtctaagtctttgtttggatagttctgagtagtgaaacagggatgttagtagtcagctctacagacagcagaattgaagtctatagtccagttgtttaaaatgaagattgcctacattgggagatttctacttagaacaaggttaccatagtcacaaggctgaaaaatttctcaaatatctatttgacttctagggcaccaagccaactgattcactgttagtgggatagaaaaaaaacaaactatgtagacctttgacattcttctgcaagctagaaaggaaatagcaataatatactggcaaggctaggaatgtgctgagaagagaaaagtcagcttgcttctttaattgtgactcttttttgaagcacacttaagaagcattttgaaaggaatgtggcatctttcatcatgtgtgaattcaagatcttatagctttgtaatatctttttcctgccaagtactagattcggttgaccttttggataatgcatttttgtttgctttcaaatattgagaaagatctttcatataaccttctgttttccttaggaattaaatagtgttgagggaatcttaaaagtttatgggaaaaaataaaagatccacattcagacatctttgttttatatctcttttagctcagacagccctaagtctacctattaagctatttataagaataaactaagtctctggtgctgttttcttcctgcttctgcttgtgtttttaacattcctatgtcacatatttttcttgccttcgttctctaagaagtggagtgcctttgtttgtttatgactctgcagtgggggctgctctcctttgggcatttcaggagggtgagtggcaggacacaagttggaatgagcaaggtgtgctcacaatgcattgaagagactagtctaatctgagatgtgattcttgttggtgcattataaaaaatgagcacagggaatggttcttatgctgtgtctgcaggatatgccagtgcatctcactagataaattttgttccacttagcatccttccttcctcactgttccccaaatttaaaggtttggattttcactaatatcgtctaatctctggcactcctttccatgaaattgtggtatgtgtcctggtgagataattagaaaattggtctgttgttatctagttgacttggtgcttgtgttggctgttactttgttcttccttaactcttctttttagtcccttctgtgctagcttctgtagaaaagaggatttaacatactcacgtgcactaccgctgttaccaccatcatttttgctttggaatggtgatgatttaagaacttaaaaccaaaggcttaccagtatccagtccgtattttctacattatctacatttccccattaatgagccctcttgaatttaaattaaaatgtaaaggaacctgaatatgcatttattcattcaaatatctattcaacaaatatttattgctctctagatgctggcattgtgtaggtactgatttactcagccaagtacagtagagtgctgcacaaattaatagcagactactctgttctccttttattttgggcttctcaggcatcctgtgctgagtcttggatcaaaaacacaacaatacagaaaataatctgttctaattccttagtgttcctggtaatatatcttacacttggacttatggcttatagtactatataaattcttaagaacaatagactgaaatccttcatatctttatcttagtaattgcccatacctgagatttaaaaaaaaaattcaaaacaagaaaaaacatgaaataacagcttagtgctgtttattgaatgctcctataaaaagacaaaatattggcaacaaccaacagtccaactataaggaaagagtcagttaaaatatgatagctctgcttagaagaattttaagcagccacttaaatgagaactatgtggaaagattatgctacagcatgggaaaatgtttgcgatgttgctgtagctctagttccccaggaaacagactccaacatggagatttgcactcagacaggctcctgggcagtgtgctcaggatcagtgatcccaccaggcaaacttcattaggtttcaaggcctgagaatgatcctttgtggttctcagctctgccttttgggtcattctcatgaaaggtagtaagtacatgtttgcagctgaggagttttaccagactgtttccctgtgagaatgtaaagaaagtagatggggcagagggaaaaattgaattgctcttgcagaagccatcacaacagaggtctcagctgatctcttcagaattgcccctgactggggcaagaaggaggtatctttttgttatgactccccactttccaaatgaactatctttgaaagcagcttcccttgcggaggcaggtggatcttgagccggcagctctcttcagctgaaggcaatgcctagagtcagactcagttgagagctgacagctacaaacactcccagtatctgttagagatgacagattatacaaaaaagaaaactttatacataaagtgtttgggcatatcatgaacattatgaatccgagtacataaaatatgtgtgagtatgcacaaaaactggaggggacactgaaaaaatgaatatggctctgttacaaaagaaaagagaagccatgagagcataatcctttcaccaaataaacaatgaaaccaaacagatgatagtttcctctaaaataatgaaagaattcatgtatatattttcccctcctcactcaattttaaaagatgaccattaaaaaaattctttcaggtctcagcctttcccttgtgttttatttgtggaatatgttagagtgggataatgacataatgacaaacatagctcagtgttctgtgagatctactttgagaccgtaacgaatatgaatagttgctccgcttggcatgcttttaatctttcctagggttgcctcacccacgatgctaaagaagcagtgcttatgagttcagtaagtacatgcaccactgatactcattttcacggctctacatttcttcctttttcagcttaacattttatatattcatgatcaaaatggaattgggcatgaaaaatgtgaacggcacaaggcaaataaatacaatactagaaaaacagtttgaggtgtatatgctagtgaagaagaataaacctgaacatctattttcccaggttagagcacatatacacaaaagactgtaatcctggcataaaagtttctcatgttagctccccttatctgaaatagacttcctatttctcaactgctttcttatttccttccaaagcataactcgtagtatccttccaaatcatacatactgtgtgtgtgtttcctagtgtacccttttttttttttatattaaacagttctttaaagctgcctttaatgcacttggaattacttctttgaaaaatacaagatgagaaaagacaggagaacatgagaactattttcagatactttaaaggacttctgtgagaagaggagatttgttcaaatcaccacctagtatatgagggtatattagaactagtggactaaaattataggaatagattttgccccacatgcaagaaggaaggaattttgtaattactggagatattcagttttggaagagcaagcttcctgagctgctcatcagggtgctgtttaagtagaggaaagatgactgtctatgagatctgctgtgttttgagagagattggactggttatcagtcaagttctcatgtacttgatggcttcatgaatcaatgttatactaaatggtgtattcacaaattctgctttaaacaaatatatacgtaatcataagatttcatcttccagaagtatagaagtattagcattgcttgtgaatgctgtaaaaatgctgtgatgctactgtaatagctacagcatggaaacacaataacatactaatttctgtcactcttaacatctaatgctgtttgtctaatgaaatacattttagacctttggctaagtatttattacctaattcaataggaaaattgaaaaaaattttagatttccatcaatttcatttctttaccacaacaccttttttttctgaaaaaaaaaaaaaaaaaaaaaaaaaaaaaaaaaagtttgtccctttgctcagactggactgcagcatagctcccaacacttggttggagcagttgaggagggtgaatcacaatttagtgatttaaaaaaaaaagtgaccattttttttggaggcggggccaagatggccgactggaagctgcgtgttcagaggctcccactggaaaaaaaatctaagcatgtgaatccttcatcagcaaccaaggtattcaggttctctcgccaaaattgacaagaaggctggcctgaccacagagagaaggaagagcagtgtagtgagaaggcccacctgagagccacacggggaaggggaagccccttccccaagccaaaggaggcggtggtgagtgagtgcgctagggaaactgctttttccacagaaccctgccacccatggattggaagatcccactcgtgaacccacgccaccagggcctagcgtcccagccttggaacatgcagattcttacagcctctcagctggagtctgcttaagcctatggaactcaggaagtgggggttgctggtggggaggggggaagaagaggcaaccagcaccagctgtggctgcctgctgtctaagccatttgagctcctggggggaggggcaagagtcagcactgggacttgcaactgcctaacacactaagctccctgggcagggtgggcacacccatttctatagctccaggctgtactttcccctgctagagctagagccagggaggctggacgacttgctcccaagacttgtccccacagcccaacacaccctctgtggcagtctgcggctagagtgcctcttcaggcctaatcccaacccatcattcctcagtgggcggggcttccctgcaggatctccaataactccagctagaggctcggggacagaattcagatctccctgggcctgagtccctagggagagggatggccacagtctctggggaccagcagacttgctgtctcctcttggtagttctgagaaatccaggcagctcagatgagtgggttttcccctagtgaaacataccctctccaccaaaggacaaagtgcttcattaaatgggtcctgctccctgtgccacccgattgggtgagaccctccaacaggggttgtcagacaccctatacaggagtcatcctactggcatcaggttggtgcctgtcgaggtcagaggtcccagaagaaggagcaggcacccatctttactgctctccagactccttgaatgacatctccaggaactggagcgaatcacatgaatacgacctgaagtgaacccctagcaaactgcagcagtcctacagaagagggaccaattattgaaagaaaaacaagcagaaagtgacaacagcatcaacaacaacaacaacaacaaaaaggcctccacaaaaaaccctatccaaggatcagcaggctcaaagactgaaagtagacaaattgaggaaggtaagaaagaatcaatgaaaaaatgctgtaaacccaaaaggccagagtgcttcatctccaaatgattacaatgtcaagggcacagaactggagggaggatcagatggacggattgacagaagtaggcttcagaagatggataataaaaaactatgatgagctaaaggagcttgttctaacccaatgcaacgaagctaagaaacttgataaaaggaattgctaactagaatacccagtttagagagaaacataaatgacctgatggagctgaaaaacacagcatgagaacttcacgaagcatacacaagtatcaacagccaaattgaccaagcagaagaaaggctatcagagtttgaaaactaccttactgaaataagacatgcagacaagaatagagaaaaaagaatgatcaaagtcttcaagaagtatgggacttgataaaaggacagaatctgcgattgattggagtaccagaaggagatggagagaatggaaacaagctggaaaacacacttcagaatattatccaggagaacttccccaacctagcaagacaggccaacatgaaaattcaggaaatacagagaacatcattaagatactctgtaagaagatcaaccccaagacacataattatcagtttctccaaggtcaaaaaaaggaaaaactgttaaaggtagccagagagaaaggccaggtcacctacaaagggaagtccatcagactaacagtggacctctcagcagaaactctacaagccagaaaagattgggggccaatatttaatatcttaaataattttcaacccagaatttcacatctagccaaactgagcttcataagcaaaggagaaatgaaatcatttccagacaagcaaatgctgagggatttcattaccaccagtcctgccctgcaagagctcctaaaagaagcactaaatatggaaaggaaaaaccagtaccaggtactgcaaaaacacagcaaaatataaagaccaatgacaccatgaagaaactgcatcaactattatgcaaaataaccaaatagcatcatgttgacagaatcaaattcacacataacaatactaatgtaaatgggctaaatgccccacttaaaagacagactgggccgggcatggtggctaacacctgtaatcccaacactttgggaggctgagatgggtggatcacctgaggttgggagttcaagaccagcctgaccaacaaggagaaaccccatctctactaaaaatacaaaattagttgggcatggtggcacatgcctgtaatcccagctacttgagaggctgaggtaggagaattgcttgaacctgggaggttgcggtgagccgagatcatgccattgcactccagcctgggcaacaagagcaaaactctgtctcaaaaaaaagaaaaaaaaaagacacagactggcaaattgaataaggagtcaagacccatctgtgtgctgtattcaggagacccatcttaaatgcaaagacacacacagcctcaaaataaagggatggaggaaaatttaccaagcaaatggaaagaaaaaaacaagaaagcaggggttgcaatcctagtccctgacaaaacagactttaaacaaacaaaaatacaaaaagacaagggtattatacaatggtaaggggaagaattcaacaagaagagctaactattctaaatatatatgtacccaatacagaaacacccagattcataaaactagttcttagagacctgcaaagagacttaaactcccacacaataatagtgggagactttaacaccccactctcagtattagatcaatgagagaaaaaattaaaaaggatatttaggagttgaactcagctctggatcacgtggacctagtagacatttacggaactctctaccctagatcaacagaatatacgtccttctcctgtgccacatggcacttaccctgaaattgaacacatattttgaaataaaatactcctcagcaaatgcaaaagaactgaaatcgtaacagtttcttggaccacagtgcaatcaaattagaactcaggattaagaaactcactcaaaacgacacaatttcatggaaattgaacaacttgttcctgaatgactcccgggtaaataatgaaattaaagcagaaatcaaaaagttttttgaaaccaatgacaaagagacaacataccagaatctctggaacatagctaaaacagtgttaagatggaaatctatagcattaaatgcccacatcagaaagctagaaagatctcaaattgacaccctaacatcacaattaaaagagttagagaggcaagaacaaactaatccaaaaggtagcagaagacaagagataactaagatcagagaagaattgaaggagatagagacatgaaaaacctccaaaaatcaatgaatccaggagctgattttttgaaaaaattaacaaaatagatagaccaatagctagactaataagagagagaagaatcaagtagacacaataaaaaatgataaatgggatatcaccactgaccccacagaaatacaaactaccatcagagaatactataaacacctttacgcaaataaactagaaaatctagaagaaatggataaattcctggacacatacaccctaccaagactaaaccaggaagaagttgaatccctgaatagaccaataacaagctctaaaattgaggcagtaattaatagcctaccaaccaaaaaaaaaagcaaggaccagatggattcacagctgaattctaccagaaatataaagaggagctagtaccattctttctaaaactattctaaacaattgaaaaggagggagtcttccctaactcattttatgaagccagcatcatcctgataccaaaattaggaagagacacacaaaaaagaaaacttcaggccaatatccctgatgaacatcgatgcaaaaatcttcaataaaatactggcaaactgaatgagcagcacatcaaaaaacttatccaccatgagcaagtgggcttcatccttgggatgcaaggctggttcaacatatgcaaatgcataaacataatccgtcagataaacagaaccaaagacaaaaagcacatgattatctcaacagattcagaaaaggcctttgataaaattgaacatcgcttcatgttaactctcaataaactaggtattgatggaacatatctcaaaataagagctatttatgacaaacccacagccaatatcatatggaatgggcaaaagctagaagcattcctttaaaaactggtacaagacaaggatgccctctctcaccactcctattcaacatagtattagaagttctggccagggcaatcaggcaagagaaagaaataaagggtattcaaacaagaagagaggaagtcaagttgtctctgtttgcagatgacatgattttatatttagaaaaccctggctgggtgcggtgactcatacctgtaatcccagcactttgggaggctgagataggcagatcacctgaggtcaggagttcgagaccagactggccaacatggtgaaaccctgactctactaaaaatacaaaaattagccaggtgtggtagtgcacacctgtagtcccagatattgggaggctgaggcaggaaaatcacttgaacccaggaggtggaggtttcagtgagctgagagtgtaccagcctgggcaatagatcaagactctgtttaaaaagaaaaaaaaaaccctcatcatctcagcccacaaacttcttgaactgataagcaacttcagcaaagtctcaggatgcaaaattagtgtgcaaaaatcacagtcactcctttacaccaataataggcaagcagagagccaaatcatgaatgaactcccattcacaattgctacaaagagaataaaatacctaggaatacaactttcaagggatgtgaagacctcttcaaggagaactacaaaccactgctcaaggaaataagagaagacataaacaaatggaaaaaacattccatcctcgtggataggaagaatcaatatcgtgaaaatagccatactgcccaaagtaatttacagattcaatgctattcacatcaaactaccattgacattcttcacagaattagaaaaaattattttaaatttcatatggaatcaaagaagaccctgtatagtcaagacaatcctaagcaaaaagaacaaagctggagacctcatgctacctgacttcaaagtatactacgaggctacagtaaccaaaatagcatggtactggtaccaaaaccgacatatagaccaatggagcagtacagagacctcagaaataacaccacatatctgcaaccatctgatctttgacaaacctgacaaaaaacaagcaatggagaaaggatctcctatttagtaaatggtactgggaaaactggctagccatatgcagaaaagtaaaactagacccctttcttacaccttatacaaaaattaactcaagatggattgaagacttaaatgtaaaaacccaaaccataaaaactctggaagaaaacctaggcaataccattcaggacattggcatgggcaaagacttcatgacaaaaacaccaaaagcaattgcgacaaaatccaaaattgacaagtggggtctaattaaactaaagagcttctgcacagcaaaataaactatcatcagagtgaacaggcaacctacagaatgggagaaaagttttgaaattttctgacaaagggctaatatccagaatttaccgggaacttaaccatatttccaaaaacaaaaccaaacaaccccatcataaagtgggcaaaggatgtgaacacacacttctcaaaagaagatatttacatagccaacaatcatgaaaaaaagctcaacatcactgatcatcagagaaatgcaaatgaaaagcacaatgagataccatctcacgccagtcagaatggtgattattaaaaagtcagggaatagtagatgctggcgaggctgtggagaagtaggaatgcttttgtactgttggtgggaatgtaaattagttcaaccattgtggaagacagtgtggcgattcctcaaggatctagaaccagaaataccatttgacccagcaaccccattactgggtatatacccaaaggagtataaatgattctactataaagacacatgcacatgtatgtttattgcagcactgtttacaataacaaagatatggaaccaacccaaatgtccatcaatgatagactggataaagaaaatgtggtacatatacaccatggaataaaatgcagccataaaaatgagtgagatcatgtcctttgcagggacatggatgaagctggaagccatcgttctcagcaaactaacacaggaacagaaaaccaaacactgcatgttctcactcataagtgggagttgaacattgagaacacatggtcacagagaggggaacaacacacaccatggcctgttggagggtgaggggtgaggtcagggaacttagaggatgggtcaataggtgcagcaaaccaccatggcaagcgcatacctatgtaacaaacctgcacgttctgcacatgtatcccatttttttagaagaaatttaaaaaagtgaccattaaagaggcattggcattgattaacagctctgagtaagccctccgaggatcggtccatgtggaaatcatgctttcctgctgcctcttctgtggccgccaatttgaacagggctagtcatcatcagcaaaagccagaatctatgtacgtcacagtaatcccctcccccaccttcttcaccagcgggtaagagactggtaaaaagtaaaggcgtgagaagtgatgagaatacttatctgcagggagattccaaatcttgggagccactgccctattttcagtgtggcagattgcattccagaataaggggccaggtgtgggcacagagctgaagcaggtgctcctgcagctcctctttgtaattagctcatgtctgctcattctttgactctgcaccttactgctgctgggctgctgctgggctgctgctggctttgtgtcttctctggcaatatgccagggtgctgaagaaggaaggctggggaatgtgatgagccctttgtcacctgccaggttgccagcatctgatagcaggcatagcacagtggcctgagaaggctgcctgattagacatgtgcttccctgaacctgtccccttcttagcactcaacacctgtggctccttgttggcaaaggaacaagaatttgtcaaacaataagcattcacacctattaaattagtcatttggcataacttgcccaagcttgtgataaaaggcctgccagtgaatactgaagggtacaaaatatagcaatggaaaaatcatgtatgcacacatatgaatttctatcactacatatattatgcctggacatatgatcagtcacatccagatgtatttgttttcattaatccattggttttatattcattcttttatagattcaccacagacaaggcacggtaccaaagattagggttactatagtggtcttcatttagtttctctaaaactccatagtttgtctttctggaccttagcatatatgtttcttcagtctggaatggtttccttcctcccctatctatctactcttttttggtggcctagttgacatttcctttttcttcttcaagaggttaagtctggttgagggattggacacattagcagctattgtgtgggaaatattaggctgggggtaatcacaaggtgctttggaagcctaacaagtagagacatctatctcggtctcagagtgtcaaggaaagcattctgaaggaattttggtgtgaagatatgcaaaataagtgaagcagagaactagctaagtggggtaggtaggagaacagaatcctagttaaaaaacaaaataaaacaaaacacagaaccagccatgtacagaagcctgtaaatgagagagagattgttgagcatgttcaggaaactgaaaagtggttcataatggctggtatagaggtgtgaaatgggggactgagagagggaaggatgggctagtaagtaaaagctggactaagccttgctgattttggactttattcagaaggcaacagtcattggagggctttccagagaaacaatatgatgagatgtataattctagactactgatcatggtggcctaaaacaaagtagtggtatttaggatagagagactagcagaatgtcaggggagatgcattatgaacttacacacaacacacacacacaatcgtaattttattaaaataaaaaaatcatattctaaattattttgacagttttagcttagctttatatcatacaaaatcaagcatctttttacatcttttttatatgtttgcttgttttggttaaggcatacataccgtcccctagatcttctaaaatatttattgcttcatcttttgcattgtacgatcttaattgatctggaatttgattttgtttgaggcatgagatgggatttaattttattgttttccagatggctagtgccatttattaagtaaaccattcttttccctttgaattgaaatactgttctgtggtatattaaaacttctcatatacacagatttacttcagcaaaatgacataattttatgcttttttgcaatgtgtttactggttattttattttcatatctcacagtattttctagaacctccaagataatattgaaaacgatgatagcaagcatacttgtcaaatttctgattttagttaaaatgtttttagtattttgctatttagaataagctgcttctggtttttggaaaagatcttttattatatttgaacagtttctttatatcttattttattcaaaatgcttattaagacttgaatctcacacttttcagaatctactgatatgatcatattttgtttacttttatgaatgtaataatttatgctgatatattttccactgctgaactaccgtttcatttctgatataaatcctacttggtcatgatgatttattcttttataaatcgctagattctatctgctactatttttgcaaatattcataagagaaattggtcttagtatactgtatcagcttttgacataaagttatttgggattaataaaaagaattgagtgattttaatttttttctatggccggaaaatattttaaaaactttgcagtcatctagtttttttcctaattgctagccagaactcaggttcttcttgagtcaactttggtcatttatactttgccagatacttacccatttccattccatttacacatttgttcacagcaagttgcatgtttcttttctgatttatctaattcgtcttaatatgtgcctatgtattcttattccaatttagttactttctttcttaatttcagcttttatctattaattcctactccatagtttttttcttaagctcattacagttttcttaatttggaagctctttatttacttatttatttttgttgctgaaaacatttctggcattttccttgagtatagttttgttgtacctcagaattgtgtatgatgcaggctcctttttattgatttctaaaagttataattccaattttgactttccctgtaatccaagagaatgtattgcttaactctcaaatatatatgccaccttttggttatttctgtttattattaaaaatgtgatctgtaaaatctttaaaatattttatggggtttttatgatcaagtatttgagcaatttttgtaattttacatacatataatacatatgtacatatacaaatgttttgagtttgttgcttttgctattttatttttctgactttgcctttttgttagtttttattattaacatttatttaatttctctgattttgctttttagttttgatcttttgatttctcaaaaggacacattaaagtttttcactaaaattttatttttatcaaggttttcttttatcttcattgttctgttgtatataattttaatttctctatgattttgctgatctattcgttacatagcttggtactgagagacatgtattagtgtttcctactataattatagttgtatagatttcttctttcattctttttttttttttgtgagatggagtcttgctttgtcacccaggctggagtgcaatggtgcgatcttggctcactgcaacctctgcctcccaggttcaagcgattctcctgcctcagcctcatgagtagctgggattacaggaacctgccactgcgcccagctaatttttgtattttttagtagagatgggtttcaccatcttggccaggctggtctcgaattcctgacttcattatccacccgcctcggcctcccaaagtgctgggattacaggtgtgagccactgtgcccagcctcttctttcattcttaattttgaaaatatataattttgaaactatataatgctttattgaaatatgatttacataccatgcaatttacctaacaaaagtgtacaattcgatggttgttaatatattcacaaagttttgcaaccatcactacaatcaattttagaacattttcatcactccaaaaagaaaccccatactcattagtaattaattcctaattgtttttgctttatatatttagctacaatgttgcttggtttatgtctcttaggtcttctttgtaaattgtgattttgttttactttgtctctttttattctgtttatcacttctccccttattctaccttgttgatattaatattgcccctccattgctgctttttttcttgcagtttctttgaattctttgcctgttgactcattttcaaccttttattttttaatcaccttttataagtacaattcttgtgagagttttctcatttaatgggatgatttattcatttacatttactttaatccgtgagctatatgattttcttgatttatcatatttcttttacattgtttttgtttctggtcttttgctgttttgatcatgttgacatatacataatatttgaccttgtatttggagagttctactccaatttcccatttcattattgattatcttcctttttctcttagtagaattagacccatgggttttttattattttaaaacaaaatatcaattattttctttctaagattatattattcctatccccccaaatccccttaagaagaaacttttagaataggtttacttttctcctctctaccttctcccctctcctcaccatccaagtcctgtggtttgctgagattgtttagtttcagaatatgaacaaaatttaccttgtggtagtttggtagtttttctatgtatcagtagcttttttgtttgtttgtttgtttgttttttgagatgggtttcgctcttgttgcccaggctggagtgcagtggtgtgatctcagctcactgcaacctccgcctcccaggttcaagcgattctcctgcctcagctttcccaagtagctgggattataggcatgcgccaccatgcccagataattttgtatttttagtagagacagggtttctccatgttggtcaggctggtctcgaactcctgacctcaggtgatctgcccgcctcggcctcccaaagtgctgggattacaggcgtaagccaccgcacccggcctgtatcagtaatttaaaattaatgttcatactacaactgtccaggtaataggtcattatccataatacatgtctaatatgtataaatgtgtggacatttgtatgtatgtacacatttgtatatgatgtatatgtacacatacatcagaaagcatgtgtctatgtgtgtgttgtagggttcattgctcactaatgtgtctacttttccttcttctcttaaccagactcctctacttcttcattctgagtgatttcttgatcgattaatgtgtttttttgttttgttttttttgtttttgttttttttcattttctaaggtgtttcactgagtgatggaatctctgaatctttgccagatactcttctgggtgataaacttttaggtttcagttctctcagtatctcacctgtatttttctctcatcatctagctttcattgttgcagatgaaaagtaaattttttttaattacctgttttctcttgcaacttaaaagatcttctttatctctctctctcttttttttttttcaggaatccaaccagatattcttaggggtgtgtgtgtgtgtctgtgtttcttatcattcctggttgcaatttatgctttttccatctgtagatgtaggattttccatggttcaggggaaattctctctgtaattcatttagttatagtccttcttccattggtttcttttttctcattctacattatagtgtttttagaggttgttcctctaaatatgtttatggaaaatagaaggatcacagaaaaaatactacaagggactatctgctattttataagaaagacacggacatgtgctttgtgatttgaaaggaaggagtaacactgatagttttgtagtgtatgtttatgatactgcacttgttagatgtggttactaggtgaaaaaattcgtttcagagtactcacatgggggttggcttcatcttcattataccacatttctcattgttaaaatttatttctgatgtatgttttaaaacataaattcacagattaaaaaattttattttaaattcaggggtacatgtgcaggtttgttatataggtaaccttgtgtcatgggggtttggtgttcagattatttcgccactcagatattaaacctggtaccgttcagttattttttgtgatcttctttctcctcccaaagatggctccccagtgaatgcttcctgacatttacactcttctacagtaattttcagtacaaggtctcactctgtcactcaggctggagtacagtggtgcagtcacagctcactgcagcctagacttgcttgggctcaggtgattctcccacctcagcctccagagtagctgggactgcgggcctgcaccactatgcctggctctttttttgtatttttagtaaagacagggtttaggcatgttgcccaggctgggaccacctgctttttttttttttttttttttggagacagggtctcactctgttgcccaggctggagtgcagtggtatgatcacgggtcactgctacctcaacatcctgggctccagtgattctcccacctcagcctcccgagtagctgggactacggactacaggcatgtaccaccatgccctgctaatttttgtacttttttctagatatggggtttcaccatgttgggcaggctgggtcttgaacttctggactcaagcaatcagcctgctttggcctcccaaagtgctaggtttacaggcatgacccactgtgcccagcctaacctgtttttttatttaagtctcccttcaaacattgtctctctgaggagaggcagatactgtttttcttctacttccgtgggtactcctgtgtacccctgttgtagcccaaccataatgtaatttactgttttgtaggggcccatgagagaaagtcatgtgtctttttgttttcatatccttagatgtggcacaagtgcaaccttaaaaggttagtaatattcaccaaacaaatacttagatgaatgcttaatttctatgaaacaatgcttattctccaggtgtcaggcattatgccagtgatagatacgcagacataaatagggcaaggtccttgtcctcaagaaatgccatctgaggtggggtgggatagcagatgagagacaacagggccagatcatgaaggaacagatcgtatttcatttacagctaaaggatgccagcatttatgctattcacctttttaaagaggtgaattaacagtagttaaaaattctaacttaacttacccattaataagagcagctttgttataaattttgccacttgaggaaatgtattcttatagacccagatgtcaagctgtcatagaatcttgtgatgtgaggagattagcattgtctatatgtttcaaatgatttactgtaagtagggggtttgcgtcaatcgtaggcggaactttgggagtcagaattgcatcagttgtctgaattgaattactttgtctgtgctttctgaattttgagattaaagtttaaaatcaaagtcttggctattgacttgtatatttgtaaaagttgaagtaatcttttcttagttttaatattttcaaatctaataacttttttcttttctgatcttgtgcagtttaacagttctgggaataaaaatctttattagttaattgaatattatgggtttatatagaattgccattcataatattttaatgtaatattcaaaaaaattcatttttttttagtaatacaaccgtcactttagcatctggtattccttagcatcatcatttgaaaattaacaatattgtaccttaaagtacagaggtcctttataaagcagcaggctttctagttgatagattgctgcgcatagagtagtttttagtttgttgcctatggtgaacttcttattttctggatgattctttgggatcctggcattaggcacagaacataagcttacactgtattgtctttacatttgtgtgcaccataactgtgaggaccttttcaatgttatgaaaaatgcaagttagaagaacttctctttttctcttcaatgcacatggacctgaagtcttttgaaaatacagttcttcaaagtttagaagcaatccatggaatattttcagtgacacacggaatattgtagttcagcatatatggtcagtttataggaatttttatttattctgtatttagtttttaataagaatttcataactggaagatttcatagcaacaaaggactgtcattgaatgtgtatataaatttaacttgtatcttagagttttctagttataacatagtgatggtgatgtaaggatttggcatagaaagaagttttagtgaaggaagtgagaattaatgttcatgcagagtaatcaaaccaggagagtatggtttgataagccaaaagagatgagagttttaggaggaagggatgattaatagtgtcaaattaaaggaaaaacagcaaacaaggttaagtaagataaggacaaaacagtatgtattgatttaagtatttatgaaagcagtttcaacagagcagttggaacaggagactaatggcagtgaatattgtctgtctttgttttctcttctacactagagaactggacagataagtactattattgtctattctggctgacattattgttagtgaatgcaacacatgttgaagagcagtcttgtaacctggcaatgtgacatgagtggtgatatttttatcttaataagtgactttctcaacaagtcttgagcatccaatccatgaaaccaaaatgaatatgaaatgcttattaataaagggactgtttctcacttaggttttctactcattttcctatcacattgattttaagaagttctttgtcaaactgacttcttggctaccagaagttttagactctatagtaagctcttaaagaatattagatgtgctttgactattttaaaaacaatattattcactctgttcatttgcctcacttctggctgggaggaacactcagggaatgataaaggtaggaaagcagctaagctgtagacagcctagattgctctgcactctaatggggcgctagcaaagtgaccttcttttcccagtcctgcctgatttgcaggacttcaaatgagatgatggaaatggggcaagaaaatatgaatatgtaaactacatgtattgatttcaaccaatgtcaaaggagaagcaatagagtttaggtagaagctgtctttaatatgcaggccaaaatcttttgtatgtgttatagtcctctttggcacataaattccctcatttttcctcatatcatcctcaagggggggatcttgtgatcacatgtgatcctgcttcttattacgatagaatacattgtgcacacttatttatttttcattgtaatatccagcactataaggtggaactcttttgccagggcatcagggagtgattatatatggagaaaacttaacaataacctttaattctgtctcatcagattcctcctccatgcttggctgcccttacttttgtgggtgaaagaatgtaaatcattccagagttctgtcattattattttcttgttttttctccttttccctgaggtctagctgacctgcatgtctttccctgagattgctaatgtaagccttttgtttccaccagatagcttgatgcctatccccattcatgtgccatagatttcttttctggtttatattttccacttaatacatgcatttcgataagaagtaagatgataatatggatgtaatatggacataatatgtaggcaacttggatattctgtgaagaatggggaaatcattaagaaaaagaaaaatatattatttatgataactactgcaaggctattgaaaggtgaacagctagattagcaacatttaaaaagctgatgctctgggagttagggagaaggaagggataaacaggatttttagggcagtgaaaatgctctaagtgatatgataagtgtatacatatcattatacatttgtttaagcccacagaatatacaatattaagagtgagccttaatgtaaaccatggaatttggatgataataatgcatcatgtaggttcatggattgtaataaatgtaccactctggtgggagatatgataatggggcaggctgtgcatgtgtcggggcagagagatatgggaaataactgtgccttctgctcaattttgctgtgactctaaaactggtctaaaaatatgtagtctatttaaaaacaaacaaaaaggttcatgttcattaacattttagaggcatcctgaagatgaactgaaatttatattttctgattcaagatgagtgaattaacctatgtggaaatttgtggatctaagagaaataacctttgttactttattcagtagttactcttttgataagcacttaaaaagctataaattcaattatttatattagacttcactaacatttgcttcccatttacctctaggtttgaagtttgaggaaattcaaaaaagatttggtgaagagttctttaatatatgctttcatgagaatgagagagtccttcgagctgtaggtggcactttgcaggacttttttaacggctttgatgctttgttggaacacattagaacttcttttggaaaacaggccactctggagtcaccatctttcctatgcaaagagctccctgaaggtactctcatgctccactacttccaccctcaccatattgtggggtttgcaatgctggggatgattaaggctgcaggaaagaagatctatcggctggatgtggaagtggaacaggttgcaaatgagaagctatgctctgatgtttcaaacccaggcaattgtagctgtcttactttccttatcaaagaatgtgaaaatactaatatcatgaagaaccttccacagggaacctcccaagttcctgcggacctcagaattagcatcaacaccttctgtagagccttccctttccacttgatgtttgatcccagcatgtcagtccttcagttgggggaaggtctaaggaagcagcttcgatgtgacactcacaaagtgctcaagtttgaggactgcttcgagattgtatctccaaaggttaatgccacctttgaaagggtcctgctgcgactgtctaccccgtttgtgattagaaccaagcctgaggcttctggctctgaaaataaagacaaggtaagtgctatggacttgagatggtgatgggaactagaagagtggataattatttcagtaaattacatggtggctgtacttgtaattatttaggcaagagagcttaaagtgccatttagaagattactggtccctggatgtatgtaaaaagatttggcctcattcccagccattttgcatagtgtctgcctcctccattaatttatttcagcatataaaaagaagacatttattaatactagctatagcaattacaaaaatgatagaactcactaaaaacctgataatataaacacatgaatatttccactgaatgtagtcaaactatgagaaatatagcatttcaatattgtggggcgtgactgcaatatctttaaatacatatgctaaaagttaccttcactttgaatatgttcttttctaaatttcataatctgggaacatctggtttacatcctatttttgtcttaatatgcagaataatgtattccccaaaagctgagaattgactatctcgagacttctgtttaaattttagtattaaaatagagattcattgctttagaacatgatctctagttgagagaataaagtgaagactaggaaattttttgtggatttctttgaatcccctttgggaaatctggattataaattataaataattgatgaaaagacaccagaaataaatcttaaaatatttgggtttaaatgaacattttgtccctcaggtaaaatattttaaaaagtcaacattaaaatagataataaaatgtaaagaaaaataaaccatgattttttatgtttagtaatatgctttcagtgattaaacggaaaaacaacattaatttccaggacagaaatttgtatagttccattcagtttccagtagagtgtcttttcaacattttgtactagggtaaataaagttcttttaggctatttagcctgtttccaagcatttgagggaagctattagctattagaaatgacaggttgctctgggctaaaggaaagaagagttgtagaagtaattaaagactcagtgaaaatatacatattctggaataataataaataaatgaggaaatagccctctgaaagcagcgcttaacttgtttttgaggattttatacagcattagtttcatgattgatgatttttataattttgaagttcaatggaaagttttttaaaaaaaatattcgagaaagatggctgggtgtggtggctcacacctgtaatcccaacactttgggaggccgaggtgggcagatcgatcacctgaggtcaggagtttgagaccagcctggccaacatgatgaaaccccatctctaccaaaaacacaaaaaaacgagctgggcatggtggcgggtgcctgtaatcccagctactcaggaggctgagacaggagaatcgcttgaacccaggaggcagaggctgcagtgagctgagatcatgccactgcactccagcctgggtgacaagagtgagactctgtctcaaaaaaaaaattatttgagaatgatagaaagatgcacatttattcaatatgacgaaatcaggtggtttaggaaattaataatgtttttatcatacaagttcagtgatttgaaaatatctaaggatagacctggattccagtttggcacatttggatattttagtctgaatgaattagtattatttgatcatatgatgttttaaatacaaattgtcacatatgtatattatatgtatgtttaataattgctacccattttgaagtcctttagaatggaagaaacttgttaaatgtgtatttttgttcacatttgtagatgctttaaaacgagttattctttctctttaatttagggaatatcaaaactatcagttctgttttacagaagcacaatatttggctaggagaatttgaagcatttttggcctttagaattgaagttggtgtttttggaaatatttctgaactagaatatattattatcaatgttgttgctttatatattttatcgatttgggaaaaattaattcattttaaaatgactgcttcaggttttttccccttatatttcatttggcttctatttctatttaatttgtataccagggtaagaaatagacataatgaaatgatgactcaaatgtcaaggccccctgccaattccaataataaggaactgtgctcattgaggagatgcaattatcatttaaacatgttagtggcagtttaaaaataaagtaataggcaggatttttagttaaaataaggatagaaatctactcatccttatatttatttctgcttactcacctgagtttgccagaatgggacatttgagaggttacagttgccccaaattgatactatggtcagtaaagttgtcacatacagtcttacccagatgaataacatttttaaattagtaagtcatcaaatttcacatttacagtttattaaaacatggaaagaagaaagaaaaataatatgtaaaaattgtgtttttgttgataaatttgactttgtcttcattattttccccataatagctattcttgttaatgtatacctctatgatgtctgaagtctctaattttttagttggcttttataagaaaatgctattttaaaataatttatatttattccttcttctaacattgagggctctcataatttaactgttttgtttgtgcatttaataccaatgaaccactacgtctgccataaaaaaaaaaaatcaagagcaagcatgtcaccgaggggcatctgacgcagttatcagtggcaggattcaacagtcttgaggttagaaaaaaactcttccagatggcttgaccaagctttgattctatcacttggtttcctctacattttctctaagtgatcatccatgcctcacatattcttctctctccctattttctttttcctcattatagtattcgtatgttttcatctttccctaaactcaacttcctgtcatcatcatctttccttatcagatgtcaaacattaagtatgaatgaattggttgtttttaaaaaacccaacagattcagtgtagagaataaagactgaattaatccatgttaatttgtgctgtgtatttctttcattccatgtatatcaaatattgttctgagaatttggaaatgtattgcatagatcttttgaattacaagacattgtggtaaatttgagatgaattttttttgcagcttaatgagcagtttgcagttaatatttagtccatgtaaacataacctactgatatagattacaaagcttcttggtatggaatgaatcttgtttgagtgaatagctttgttagaaatgagagtaatagcacatagcttccttctctgccaggtaaggtcatgatgtgtggtgaaagtatcaacaggctgggagagaggtgtctctgacagccatgatcttagtaaatctttttaatgtctgcacctcagttttatacattggaaattaatgaacctagacaaactaatatttttactcctttacaaatcatacttaacatatatacatatacatgaggtcaattgatcatgattttttttttaattttttttttaatttttttttttggagatggagtcttgctgtgtctcacccaggctggagtgcagtggtgtgatctcaggttaccgcaacctccacctccctagttcaagcgattctcctgtctcagcctcccgagtagctgggactacaggtgtgcactaccacacccagctaattttgtatttttagtagagactgggtttcaccatgtttgaggccagactggtctcgtctcaaactcctgacctcaggtgatccacccaccttggcctatcaaattgctgggatcacaggcgtgagccaccgcacttggccatgaagctttctttcatctctatgtttcagtgaattcagatgcattttaaaagagaggtgcggagaatctgacttacctaccatgaagggatcatcttgttatcaagaattagttaaaataattctctggtagtttaggctgcctacctcagaaagttatttgggaggattaaatgacataatccatgtaaaattcttagcatctttgaccccagggataagcactgcataaatgttcattattacttctactgctattattagttgtgttcctttccacctataacagtctccgtatttattcccctattcacttactgccttatagatgaaagcaccaggtatcagtaggtttgataattttagagaaatattgagctcacctaacatcttcctaaaatatgccttggaccctgctgcttgtctccttaataaagactagaagaccacttgtcacacattctataggagctctgtttggatctgcattttatttacatactatcattgttttaaaatctctggtctctgtcagattgatgaaggtttggaatcgagttttcattacctgtatctactaatgtcttttatgttcatttatcagagcattgtgcagtaacttccaaaataaaatggatgtgttaacttaggcacaacctgaagcagcaacggattttgagaaacaataaataacatgagttcttttgacatttttttttagtagcatcacttgagagaactttaatagcaccttggaaggaacccagcatttgaaatacatcatccctgcgacagagcaatagcattgttattcatcttcacttttgttctcagggttggaactgaggaaaagcataacaaaaacacatttcttttttaattcccagaaatatgctctcatttgtcttattaattagaagctacaatcaaacgctgggaaacaattttcaaagaataaagtaggaaatgtctggttttctgtggccaaatcagttttcagaatactctcttatcttttctagacagttgcccacctttttctgaggcgatgattgaaaagtttttaagtatttattaatcttactataccataatgaaaccgttgaaagacaagtttcatcttgctgtcaagaatacattatttgacttcaaccttaatttaatttgagaaagtgtgagcatttcttctttgttcagataataatattttattagagaatttcaaatattgaactgtagttacctttagtgatgaacaacctgacattagagctttctctatacattagcagagctgagacatgatttcgttcagaattacctggagttcactctgttcttgtaagtatgaatgagacctttatttttaatttgtgtgttgcttacctttctctagaactgctctctgatcattgcccttttttcttttaatgtaatttattattttttaataatttgaacttcatctagattcagtgggtacatgtatgggtttgttacgtgggtatattgcatgatgctgaggtttgggctttgactgatcccctcacccaggtcctaagcatagtgcccaatagtttttcaacccttgtcccccctttcccatccagtagtcttcaatgtctattgttgccatctttatgtccatgagcaccaatgtttagctcccacttttaagtgagaacatgcggtatttggttttccgttcctgtgtttgtttgcttagaatggtggcctcaagctgcatctttttttatggctgcatagctgcatccagctatgtgttctttttaatggttgcacaatattccatgatatatatgtactacattgtctttatccaatccaccactgatgggcacctgggttgattccctgtcttcgctattgtgaatagtgctgcaataatcatatgagtgcagtgtcttttgagtagaatgatttattttcttttggatatataaccagtaatgcaattgctaggtcaaatggtagctctttttaacttctttgagaaatctccaaactgtttttcacaaacgctgaactaatttatagtcccaccaacaacgtataagtgttcccttttctccacagccttgccagcatctgttgcttttgacttattaataatacccattctgcctggtgtgagatggtatctcattgtgggtttgatttgcatttttctgatatttagtgatgttgagtatttttttatatgtttggtggctgtttttatgttttattttgagaaatgtctgttcatgtattttgcctatttttaatggtgttattttttgtttgcttaacttccttatagattttggttattagacctttgttagatgcatagtttatgaatattttctcccattttttaggttgtttactctgttcatttactttgcttttcagaagctctttagtttaattaggtcccacttgtcaatttttgttttgttttgttgcttttgggacttagtaacaaattctttcccaaggccagtgtccagaatggtgtttcctaggttttcttctaggattcttactgttcgaggtcttacatttaaatatttaatccatcttgagttcatttttgtatatggtaaaaggcaggggtcccatttcattcacctgcatacagctagccagctatcccagcaccatttattgaatagggagtcctttccctattgcttatttttgtcaactttgctgaagatcagatggctgtgtgtagctttatttctgggttttctattctgttccactggtttatgtgtctgtttctgtaataataccaagctattttggttattgtaaccttatagtatagtttgaagtcaggtaatgtgatgcctctggctttgttctttttgcttaggattgctttggttatttgggctctttttttggttccatatgaactttagaatagttttttccagttctgtgaaaaataatgatggtatcttgataggaatagcattgaatctgtagattactttgggcagtatggccattttaatgatactgactcttctaaactatgagcgacaaggctcatgtatgatattttgatgcagatattagtgatgttcatgctggttctgggtttttaaaaattagtataaggttaaaattgctgtatggtattttttttaaatgaaccacacaggaggcttaatggcattgttcctgtatagttactttattgtgtatagtaagaggacactgtacatgattacatgatgaattatgtattcccaatagtcatctataggcttaaagtgcttattttgccatatttaatttttgttaacaagaaatattgtagccctgagcataacaggaggtacctcctattggagatcagatttttatttagttctattaaaggtttgtaggttctcagggataaaaatcaatccctttagttaaaaatcatacagaatcttcctttaactgttccttttgtttttaagttagaatcattttagccagtagctttaagtctcagtgaaaaaaaaatacatgttttcaatgtgttgtctacctcttcattttttgatagtttcctgtttgttcttgtgtacttttttggtaagtatacagtgcaataatttttagtaaatgaatataatagtgcatctacgacaacaatttggttttagaaaactttatcacccccaaaagtttacccatttgcagttaattcctgctcctacctccaactgcagccaaccactggcctactttcatctctatagatttgcttcttctactcatttcttacaaatgtcatcatacaattagttatctttctttttcttttggtttgccatcatgtttttgagcttatctgtagtgtagtatgcatcagcagattgttaatttttcctgatgaacagtattctattgcatagataccacacggtttgtttatccattcaccagttgatggacattgattttccagattttggctattatgaataatgttgcaatgaacattcacatacaagagtttgtgtggatatgttcccatttctcttgaactgatttgcagttgttgcatcatatagtaagtacatgtttaatttttaaagaagttgctgaactgtttttcaaagagcttatgccatttcccatttgactggcagcgtaagaaggttcagcttttacactcacacctggtattgtcggtctttttcatcatagccttcctaatgagtgcaaagtggtgtcttaggttttaagttatacttccctgatgactaaagatggtaaacatcttttcttatactttttagtcattggtgtaatttctttagttaaatatgtaggcaaatattttgtccatacttaattgttgtttgctttcctattaataaattgtattaaaaatatacattctagatatgatattgtctttaaaaggtacttcctatgcagttgtcttttataatcttcaatttactgtcctttaaaaatatttatggagaaacttctgttcagaaagtttcattcatagaaatgtaagtctgggctttatcggtcaacactgtttacatatttcagtatctccttcagttgcacttgactttatcctttctattgatatcttaggttgaaataacagttttcctctggatatattctgtgtggccatatgctggtctcgaactcttgacctcgtgatccgcctgccttggcttgccaaagtgctgggatttacaggcatgggtcgctgtgtccagccccgaagtactttcaaaacaggaaaagatatcaaaggcatggcaacataacacactaggtttcttttcttattattttgttacagttttacttttcaaggattttgagatttggtataattgagttccagaacttagacatcaacttagtattttttcctatagcaacttttgaatcatgacttaagctacagcatctttctttttgcaattgggttttatggtaatttctaattattataattctgatagaaacaattagctttacatatgctttgatagggcatcatccttgagcaagcacagaaaaaaagcagtattgagagacagtattgtgtatgattaagaatacagtctctgtagaatggcttgaagccgggaggcagaggttgcaatgagccaggatcgcaccactgcactccagcctggttgacagagcgagactctgtctcaaaaaaaagaatgcagtctctgtagcaggacttcccaacttcagactgttatttactagctgggtaaccttgagcaagttaactttttgaagcttgttttcattgccaacctcatagtcagtgggcctctcttgtttgttcccatttctttttaaaataactaccacattctcctgacttccacaaatatgtttactacttgtttcagttttatcactgaagacatatttaaacattcccttagttgtttttctcatttttaatccttagttttgactaagccttactccttttgttaaattttagtatcattattcttagagaaaaatgccaaaatattaatatttaaaaggcatatctgtctatccattagtatttatctgtatctatgtatcttaacatttctggcactgttttaagtgtcttccatgaaaatgttataagaaaggagtgaaagctgctttcaaatatttaaatagttatcatataaaaattagataaagtttttgtttcagaaggcaaaaccagtgtcaaagaatagatgttataagaaagtagatttggttaagaattaagaggaactttccaacaactggagacattaaaaatggagggagttgcctagtgaaataaaggtctatataatacttgagagttcataaagaaaatgaatgacagtcactcagggatattttactgaagattcataaagggaacccaaactttaaaggtaaataatatgatcacgttatttttgtaatgctagtttcaggaatagggagagtatccatattataaacattttgtgctattgtgaaaaaaaactttgattctgttttcttttcatagcagatatggtttaaccttaaaaagtaatgaattggtggagtagagagatttagaaaagctttgactatttagcaattcttcttctttcaaagcttagtacatagtggcttttaaaattcaactcaataaagtatgtttaaaatgctgcctgtatttggattccaagtttagtagacaatttctgctcctcaaaatgcaatgaaaacttgatttctatgatctatgatgaataataaaagctgcctttaaaacattttatacttgtaagagtgctttataagaaagccacttatttacatttttcagcctccatgaaattgaacctttaagaaatgctaaaatagtaaacaagtaattaggctatgagttattaacaagttttatttcagtttatttagttgttagacaaagctagtttacacatttctattatactggtggctaaagattatgatcacttattagagagatcagtttctattgtacttataacatgattcagaacccttcattctgtttaacagcatttccttattctgtgaagaaatgagtacagtttaccacattttatttttctgaaaataatcaaaatccaagtacagtcatacactacacattgatggtttagtcagattgactgcatatatgacagtggtcccataggattgtaaagccgtattttatcataccttttcaatgtttagacacaaaaataccattgtgttccagttcttacagtattcaggatagtcacatactgtatagatttgcagcctaggagcaataagctctaccatttagcctatgtgcattgtaggctatgcctctaggtttgtgtaagtataccctgttgttcatataatggtgaaattgcccaacagtgtgcttctgagatgtatttctcttgttgttaagtgattcatgactgtatttatgtttgaatcatacaataatcttggttcgttttccgtttttcctaatgaagacatggtggttttttttttttccttggagatacaggggggtcaaaaatctgagcatattgtaggtgacaagcagtggaagttgattccaaaactcttgctttttgaaggagaggtcaagaattatatttcttgtcagcacagactcatctgtgaagttgttgttggctgatgttaaaaatgcttgtaataacatgtgtaggttcttcaaaggattgagatttcaagcttacatgtctcaaaattttgagtgaagcagtgactcttttttggccattgaacaccagcttcagaaatccttccatccactgtagaagaggtgtgagggaatctctttctctctgtgaacatatatggagaactcatactatgatttatggcagcttgcattttcatatttttctaatttagatgttactatgaataaggtaggtgtagatctaacaatagaattgccataaacaggagttagaaattcttaacatcctacagtaaaagaattttgtgctactctgatacattttttaggtaggttataaattcttatcttactatcttaatatgactaattatgacagctatttttcagtagtttaattaccattctaccctgttctgtggttataaagacttattccaggccgggcgtggtggctcacgcctgtaatcccagcactttgggaggctgaggcaggtggatcaccaggtcaggagatcaagaccatcctggctaacatggtgaaaccccgtgtctactaaaaatatatttaaaaaaaaaattagccgggcgtggtggtgggcgcctgtagtcccggctactcaggacgttgaggcaggagaatggcgtgaacccggaaggtggagcttgcagtgagccgagatggcaccactgcactccagcctgggtgacagagcgagactctgactcaaaaaaaaaagacttattccatacaagagtttattattctgtgaaataatatatattattttatgtacaatgtttacattctatgtcaactcaaaaagaaaattttgtgaagtttgtgttcttatccccccagtttatagaaataaatagtacctaataaattatttatagttctcttgcttgtttctctataatcttgattttttttttgagacggagtctcgctctgttgcccaggctggagtgcagtagcgcgatctctgctcactgcaagctccgccccccgggttcgtgccattctcctgcctcaacctcccgagtagctgggactacaggcgcccgccaccacgcctggccaactttttgtatttttagtagagacagggtttcaccgtgttcaccaggatggtctcgatctcctaactgtgtgatccacccaccttggcctcccaaagtgctgggattacaggtgtgagccactgcacccggcctctaatcttgattttatgggattatgtatttcaaagattttacattttaccctgttaattttttttttgtttttaagtagatacgatttttaaacttgaatcttcaccactgaattacagaagagaatgcacaattgtccattcccttctgttatttagtggtgaagattcaagtttaaaaatagagaaaatagagaaaaaagattattgtgctgttcctgatggggatcattggacactataaaactgtgtttgattttccttaaataacatgattttggaaactttatatatggtttgatcactttagttttccccagacatttctttcgagtgaaccattgttttacagtgtgacctccggggcactgccgatactcggtttatggggctgcttctcaccactatcatataacaatttaaattaattaatttaaaaaatgtgttcggagccttctttaagtctaaatatagagtgtatgtctatctgctatgtttcccttaactactaatttgataattctaaggggaagagatgattcagtgggtctggtatgaactgttctctataatctgagcaaggctctgacctcatctttcctgaaggtggaaaaatggtctcataaatttctttttttttttttttttgagacagagatagagtctcactctgtcacccaggctggagtgcagtggtttgatcctggcttacttcagcctatacctctcaggttcaagcaattctcgtgcctcagcctcccgggtagctgggactacaggtgtgcacccctaggcccagctaaattttgtattattattgttattagtagtagtagtgaatacagggttttgccatgctggccaggctggtctagaactcctggcctcaagtgattcgcccaccttggcctctcaaattgctatgattatagacgtgaaccactgcgcccagcctagtctgataaatttctagatgtttttgttattatgtgtataaaaatggactgaagtattatttcctatctttacacttgttaattcttgactcattatacttacactctatttacttttacagatcatactatcataggtgagagggcttcctgggttaattttcaattatatttcctttaccccttaccctaatcagagattgctatcaccagaacgaatggtttatttcaaaattctacatttattttatttaagacatttcattccccaattttgtctatctcctttgtcattgtttgcatttaatgtttggattgatttttcttggaatggcataggtgaattgactaagacactatttttagcatattgtaagtttcagttgtatttttcaaaagcacactttatgactgggaagaagcttttgagtgttgatagcgtggagtctcaagattgcttatcagaccaaccgttaacttatttataaactattatgtattataatgtagacaatatatttctttatttttagtataaaatgtcaaaaatcattgtatttgtcttgccaaaaattagggtaaaaatgatcatctaagtatttattccacttatgtttctactagaattaatcaaaacacttaaaaatctatttttatttaacttgaattggaggcccagaatctatgacatcatttaccctttcataactgaggataatttaaaacagatttcatacctcttggtataaaactcacaggcagtaagagacagaagaatgtgctctaaaattctaccagtgcaaatataaaacaatgttttattacagcagttattctgaataattgatacagtttatcaaagtttaaaagtaatatgatttttctttaaagttagtggctttcagtttctggttgaaatctctctctctctttctcctctctctctgtctttctttctctctgtctctctctctctcttttgaaaactttttcaggattttaatggactttgataagtatggaatgcaaattaacctgataagcataatagtttcttcctaccctttcaaagattatgattattaaggtgatgatgatgatacatggttttgttttgttttgtttttttgagacaggatcttgctctgtcacccaggctggagtgcagtggagtaatcttggctcactgcagcctcgacctccccagcctcaggtgatttctcccacctcaggctcctcagtagctgcaactacaggtacgcaccaccatgcccagctaatttttgtattttttgtagagatggggtttcaccatgttggccaggctggtcttgaacctctgggctcaagcgatccaccctcctcgacctcccaaagtgctgggattacagacatgagccaccaagctgggcgatgatgtgtatttgttgagtgcttagtagcaggccctcttgtaaacattttatatgtattatcttatttgactcccgttgcaaatatgtgaggtagagacatactaaggcctacttcttggatgaggaaactgaaatacaaagagattaagaaaacttttctaaggttatatagctagtacatgccaaggacaatattggacccaaatggtcaggctctagatagagcctgtgccacaatgcgtggcctgaaataaacttcactagtgtattcttctgaaagaatatcacacaacatttattgcaaaaaagtattatgataggctctgtataaagttcttatttttatggagtctaggatcaattttgggaatgagatataaatatatgtagagatcatgattaatgcagaaggtataaagaagttgtccattgaactataatcagtgtgagcttgtaatgttcttcctttgagataagctgaattaaaaaatgttacatttaagtaattattttgcttgtcctatggacacaagtgtagattatagtaattgccagtagattatactactgacaatttgtaatttttaaaaatgttatgacaaaacatatgtgtactgcttctggaaaattgaaataagtttccttcctaccacctattctaaaatcaaataagaaaattcctaatatcatcttgattgctttatgtaacattcgtcaaagatttaagaatatatattttattcttataattttggtttatctcaatagatggatggcaagacttatctttgtcattttagttttattttacaaatggtcttgggaaaacctgtcagtttttaccccacgaaaatttcctctgatatatggtagttctttcaggttccagattagtttaatactttaaaacttctcaacctttgtctcataaggcttttattttattttataacctgttctgtctcctcatccagaataaatttatagtgtagtctattattctactccctattttcttcaatatagttttcatatattgttaccatcccccttttatatgtcaatatttgctaaagtaaaaattaaaaaaaatctttctcctaatgtacctttttgtcatatgttttaaaaaaaattgctgcaatattgcattaaacttgtacataatgtcatattgacaatggcatgtttacggggatgtgtgattgtgggccttgcaaaggagtccttggagttcacctaggccagtcacatgtaggacacatttatgtgttgttttcatctttcatgtttttcagtcagacatgtagagttttgttcattattttatccctgacatttagccattgtctttgcatacagcaagtgtttaggaaatgtttgctaagcgagcgatctaaggattttgtaatttattctgttttgttgttaaggccaaactaggagaatacatgtgatagcattttaaagggcactgcttatgtaaggtattatattcgatacaattattcatccattaattagtgattacatttaaatgttcactgttaacataaaataatctgattacttaaacaatatttctccaatatacttgtcattataatctgcctggcataaattgcaaagaaaaccctaatgaaatcatttcctagtgggtccccagttttggctattagtccaatttcagtcattgcccataacatagcaattcaatgttattatatttccttttcattttctagtatgtttctacaacaggtagtccgaattttgacctcgagtccctagtcaccttcctttatcttctttcgttgccactgtcgcctgtgtatattcagtcagggttcagttcaagaccatttttgaacgtttattccattgcaagcacattgggagtatacatgtgaaatgacagatttccagtcctaaaggaatctcttatcattaactactcatatatatttaaattaaccactcatatatttattaaattgtgagtacatatatatatatatatatatatatatatatatatatatatatatatatatatatgtagttaacaaagcactgaattaccattatttgagagtaattataataaggacaatttgaataaaagaaacccatgaagtatagattttttaaaaacatatatatatatatatgttcgtgtgtgtgtgtactcacaatttaataagagaggcatataaacaaatatatgtatttatatacaaatatatagttgaatatatacatatatatttgtttctgtgtctgtcttttattaaattgtgagtttcttaaggacatgaattatatcctatccatctgtgtttctttagcacccagtacagtgcctggcataaggtagacattcaattgttgaattaagaaacaaagactttatcctatgtttggagggcacatataaaaatatttcatttataatcctcaattcaaagtcttctttcaccttaacattttaaagtaaaagggcaggtatttgtcatccacactttatagttgaagaaacagagagacaaatgttgtctgatttcccatatgctgtggtgctagcaccctcgtctgctgatatctcacttagaatcaatttcatgaggaaagcaacctaggcaaaaagctaattgtacaagtgttaaaagttcatcactttttcaaattgtatagaataaatgctttttgggggttgagctgatgtgcactttatgttaacattttacttagacaaagaaatgagtgactgtcttagtaaattcagtaattttattaattcccaagagcctactttgtactagtcactgtgttgtgccagatgttagagatatgaagatgaatacaacacatgttgttaatgggctttcactcaagtggaaggcaaaagcaaacacattgtggtaacccctaaaatggaaggggtttgtttgtttttttgcttgtttgcttgctttaccaagtgtttacaatgagcaaggccttggaataagcattttatagacacagttttatttactctttccaacagccctagggggtaaaattactatcgccattttacagacaagaaaattgaagtttgactattgtgttgtggggccatcgatgagtggacaattggttctttgtgaaggaattggagaaggaaactgggactaggagaatggtatggtcataatgggtcaaggaagagttctaaaagatttatttaaagcacatttttagtaaaagagtagcagtttttttttaaactagaattgttttagtcctttaatcatttttgaagccttttttggaccacattttgtcttaagatcacatgtctggcatggatccctgggaatatgcagaaaggacatcttagaatgctctagttggttagaagtgtggaaacagctgagggatttttctagtcaggtccagtaagagaagtgatgctgcaagttctggtcttggagcatttcaggatatgggaattgaattcagtgactatggaaataataatgagaaatccataaacaagttttaaaaataggtgacttccatgccctgtttttggcttttcccagggtatcatataattatattacattgcacatggattgagtaaggcagagtatgtaacagttgaccttatacaccctaatattttcactggctttagttcatgttgcaaatattgagttgattataaaatataaaaagaaaaatcaaaatgaggttcatcataggattctgaatgagacaatttcagagaaagcagagactccattgctttttattactagaatgtcattgctttccagtagctactgcattaccattatttgagagtaattattataaggacagttagaataaaagaaacccgtgaagtatagatttttaaaaaggaaatatgattttgttactgcgatcgactttattcagtactgtgaaagaaaccaacaacttaattttctgctgtttacttgagcttctaacaaaatggtaataagaagcagcttacaggggttgctttagtgtctatttaagtgtcatttgtaattataagatctgaatgataaacaaatggaaatgtttaaacaaatggaaatgtttaatccattaaacatggttcagtttcttttaatagattaaaatttccctcaaatcataatcatgtttacactttcaatgcttaataaatttacactccacccatgttaatgtattataaattttgagttggtggaatgtgatttaatacttaatgacaaaagccattagaagtttttctttttatcttttactaagtaatattttatacagacaaaagagtataatcgatatgtaatataaatgtaagttatgaagcataaataacgtaataacctgtgaatccactgcctaatgtaacagttaaaatattcccaattttatactggggaactccctgcatccactttcttcactttcttcccagttctgcactgctccatccactgaaataaccattctcggtttggtgttattgccctggtgtgtgcgtgtgtgtgtggttttttttaatggcgttcccctaatgtatatatctgtaaatacatttgtttacttttacttgtttctaagctttataacaaatgtaattatatgtcagagatttttgaggttaggtattagctagtttatctattgcccaatgagtcaacctgtaattttttgaactgtggtttagcgcatctcaatttttaaagtgctttaacatgttttcttggacatcttcacagttgtccttgtgagtaaagcagtggaggtaacatctaactcacttacttttggtagataaactccatgaagagtaagctcagattttaagaaatgaaatgtggcttctctgtagtgtgaactcatgttattctcttctcttcacactgttctagccactctattttccttttatttcctcagatatgtaaaccttttttctacttcagggattttgcatatactgttcttgattcctaaaatactcttctacctctttttagcatcactaacttaatttttgtccttcagatctcaactgatatttgatttccttccttgaccacttcacctggggagtccacatgcctttattgtctattgttagttttccacattgcactatgccaatttttttccagcttgattgaggtataattgatgaataaaattatataaatttaaggtgtatgatgtgatgatttgatatatggatatattatgaaatgattatcacaattaaattagttaacacatctatcacctcaccaagatacctttttttgttattatggtaacatctaaaatctactcttttagcaaatgtcagtgtacaatacagtattgttaactatagtcatcatgctgtatattagattcttagaacttattcatcttaaaactgaaaaagtttgtagcctttgaccaacgtatgccaatttgtgattatatattcttatgtttcttcatgtttttgaacatgagcattggacaaaaaacatgagcaaacataacaatatataatcacgcttgttttttgtccggtgatttgactgaaagatccatgcaggcagagacaatgcctcctttatccaccaatatgtacctagtgtcttctaaaatgttttgcatataggaattcaataaatagataataaatgaatgtaattatagtctggtattaaagatgaaatacacagacaataattatttggctatatacctgggcagtatcgaatttaggttaaatatcagatttttaaagatgttgcccactttgaagttgtatatcccagaagatgataaatcaagattttattggctttctaatattgattatttgaaatgctaggtacattgtacacttgagtgggtaactaccttgtaattcattgactggaaagaaagataaaaagctgttaaccttttttacttgtcatgagatgaagtgtgcacaataaatcttttctgtctttagttgtttgcctgggtaagtgatctaatagattcacaggtcttgtcaccaataaattttgaaaatttcctttctttttttgtgaatttgaaattaatgtgacatgtgtaatgtctctgtgtgtgtaatgtctatgtgtgatgtgtgtgcacgtgtggaagagagaatttgtgtgtgtttatgtatgtctgatgtccatggcgaggaagaatatgcaaacaaatttgagttctgttgtctccttacaagtaaatatgtagaattatgcattgtttaagagtaggattttttaaaaaatggtgtgttgggtaaaatatttgctttcaaagagcagaattaaagggaaggcaaattggacagttgccaagtgctgcattcaatgtggggctctgcagtgtcactgcaaatgtaataaatagagaaaattgcatttaccacaattttttttcaaggagagaacacaggtggttgcaagtaaatctgtggtgtgctccatcataacagatagtccttacagtgccccccaaggagaactagtgaactgcaggcatgttttgcagagctgggcatgcaaacaggggcgttatacccttcgttctccttctctgttctacccagagcagtagttcctactaaatgcttaaagaatgtttaaattattttatgagaatttaaatttgaagaggaatcacattattgtctgcccatggtacccacttctccttgttgggctttgctaatttcttttttttttttttatactttaagttttagggtacctgtgcacaacgtgtaggttagttacatatgtatacatgtgccttgttggtgcgctacacccattaactcatcatttaacattaggtatatctcccagtgccatccctcccccctccccccaccccacaacaggccccggtgtgtgatgctccccttcctgtgtccatgtgttctcattgttcaattcccacctatgagtgagaacatgcggtgtttggttttttgtccttgtgatagtttactgagaatgatggtttccagcttcatccacgtccctacaaaggacatgaactcatccttttttatggctgcatagtattccatggtgtatatgtgccacattttcttaatccagtctatcattgttgggcatttgggttggttccaagtctttgctattgtgaatagtgtcacaataaacatacatgtgcatatgtctttatagcagcatgatttataatcctttgggtatatacccagtaatgggatggctttgctaatttctaagagcattgcctgatctatctggctgctgtttacctccaaccccttgtcttgtcactctgtaccataagcagtctcatccagctgccccaatcttgcatcttttcctaatatgctaagctccttctggttgccacagggcctttgaatatgctgcttgtttcgtctgaaatgctctttccctaactttttaaatggcttcatagtgctcagattttagcttaaatatcaactcctcagaggggcatttctcttgctctatgtgaaatagaagtagcccagtctcagtgctctgtttattttctttataacactactatctgtaatgatttgtttctttattgtcttgtgtcctcactaagatgttagtgacatgaaggcatgggcctaattgcttattttgtttttcatcttgtattcccagttagctcctagaacaacattttaattacataatagattctcattaaatgttttaaaaattaatttaggaatgattggtattcaattctgcaatttctagtttgtacattctaattttttatatcatgataatgttttatttctgcaagtgtttataaattttatgtaagttgtctttcatatgaaagagcagactcagcccaggttttcctgtgatgatgtcagtaatcaagatatatctggactgaaccaacgagtcagtttacttagcagtagataaaaacatgacagaaccctgctacgctaattggctacttattcttctttgatgtaaattttggtatactacctttatctaaaaaaatacatatatatctatgttcatgtgtacttcaaaactgcatttcactctagttaaaatatggctcacctggtttaagcacaatctttaagcaggaacatgaaggatatcttgaaatctcttccatatttataactgctgatatttgagagtctgtactacgatccaggcccagggctacctgctttgatttcttacttatatttaatactctcaacaaccaaatgagataggtatgattttatcaatgtggattagagagagtcagtaatttataacatttgttttacatatatagactgatagactgataatctgcaacccatgaaaattttggatttttgctaaataaatctttgatttttccctgaacaactaatagacaggattgatataacagctgttgtcatttatgattctcaaagtagtcttactatttaaccaaaaagtactttatgcttatgactaaattgtcaactaaatcttttgtctttttatgtttaatcaaaggaatactttgtaggactagtgtttagaaagctgtctttataatcagagtcacaaattagtgtgctgatgttagtgcattttgatcatgtcctttatgtatcttatccccttactttcccttgttccccttcatggattttttttttcttttctttacagtgagagtggcagtaaccatgacagataaaaatgttgtgtatatagaagctcctctatttcaggttaggtcccagaaggctgtttttcagttgttcttaaatccaaagtggcttaaggggtttcagcttgtaatgctcaaatgcctttccaacaagcagttatgagatttaaaatgcacaaatagtgtgaaatcttaaaatcagacatagttctttttcacttggtttacgtggctcatttatattaaaattgggttgaacgaagaagcaccctttttctatgatctctgtaagtaacttagaaatgcttcagtgactactgaatttacagcgagataatcaccatgtttccttcatgttcttgaataaactttttaccttgcccaggattaaaattaggcaatgttctagccacattttacaaaatgtttttttatctcctgctgatagactgtcagttgcacaatgtggcacttttacatgtgttgtcgttttttagtggttgccctagatttttcaacccatatttccaactaatctaaattcactttcaaatgacactgtattgcctcgtcggtagtacagataccttgtaacagagtatgcccaatccctccctccctgtcccctataaggttgctgccattcttgtcacttatccatatgctttgatccacaggctatattcaggcaatacattgttactattattacttttaataaagttgtctatcaagtcagttaagaacaaggaaaatacaatattttattttaccttcattctttctccaactctctttctttcttcaaaaagatccaagtttctgatctgtataatttttcttcttcctgaagaacttttttaaacatttcctgcagggcaggtctgctagcagtgagtttcctgcttttgtttgtctgaaaaagtctttatttcttctttacttttgcaggattgctgtacatacaattctaggttggcgtttttttaaatttcaacataaaatgtttcagcccactctgttcttgcttgcattgtctgatccaagaaaagttgttgattttctgtttgttcatctttttttcttgttggaagatggagtgacaacttacaaggtcttcacatgttagagctgaaactagaagtccctttgtgacttactctttgtctttcaaaatactttatactgttgcaaaattccaaatacccatgaaacatttttactcttctcatattttcaatttttaaaatattatctttatttattttctcttgtaattatttctcttctcagattttcaatttttaatatatttatttaattttccttgtaattatttccttgtgattattatttttatttttatttaattttctttgtaattatttctctttttaatgttgtatttgttgtatttgtacttactggacgtagcatggctagtgacattcttaaaatacctcaaaatcaaacatagaaacaccaagccaagtgaagcctgtttacaacatgttaaggtaactaaacatctgcctacttggctgttatcaccatttgttgatggcatcagagtaattcagtagctgaattttgtttgtctgcataaaaaacttataaagtagggtcactttcacattaattatgtacattaggagtggcactataaatggatatttggtgggagtaaatgaaggatagtgtgacccattaagttcaagggcatgtcactcagtgaaaatctgtatagatactgatatcttcatgtatgttaagaccccctagtatatgctcccatagtattcagtgtaatatacttactacacagttgcttgttttacttgcctgtctcccctacaaatagattttgctttctgtctcactggccctctctctcttttctccttccctccctgcctccctccctctctctctctctttctttttctttctttctttctttttttttttttttttgctttttcattacctgattgaaatcaatgacccaacaaacattagcactctttcagtctttagccaggttatgcttgatggttgccgattaacatttagtactttttctatgttgtggctaaggaacactttggccttcaagcataaggtattttcccctataggaaatctctttggcatttaattaagaataatttagtgggatagtcttgagtattttaactttaatgttgagatgaagcaagtcatgcttataaatttacatagcacattaggtctacatctgtctagcctcatttaggtactggatttgtattttgaagagctgtactttgatgtctatgtgtgctatagtttgaatatggtttgtttgacccttccaaatcctatgttgaaatttaatccccagtgtggcagtgctgggagatggggcttagtgggaggtgtttgggtcctggcgttggatccttcatgactgaccagcttggtgctttcctcatggtgatgagtgagttctcactgtattagttcccataataactggttgttaaagagaggcaggcatcttccccctctctgtcacttctattctcatcatgtgatcactgcacatggcagttctcctttccactaatggcagaagtagcctgaggctctcaccagatgctgatgctggtgccatgctttgtgtacagcttgcacaatcatgagccaaataaatctcttttctttataaattgtctagcttcaggcattcctttatagcagtgcaagcgaactaagacaatgtgtttgtgtgtttcatagattagtacaaattgtgttaaaatatttgattgcttttatatatatatatatatatcttttgaaaaaaattccacaacataagcaaaacatcaacttacatttgtaactgtgtatagaatgctggtactgtgtctaaaaccaacatgttttcctaggtttggaaaatatcaccacagtgtgtttgctgaaggcaaatagtttgtgtttgtttgatacaaaatatttaatttttatgagagaatcagtggtagaaatcagtataggttttttggaagcaggcagatcaaactcctacttggctaacaatagttttcactgatgagctgattgttcttatgctgtgtagacagaactttagtcaaatagagaaacagaaggtttcattaaagggcacagttaacaattttctttttatacagcactgttcttttttctttataggttgatattttattttcattattatagcatccaagtgctgttagggcatagagaaatcatttcatctatttcattgacaggattgtgccaagcttattctcaagccttcataatgattgaatatagagaactgcacagttaaacctcaccccactgcagttttctcaaatttaaaaggaaaatttagtcgtgagtgtctgtagatggaagatactacagaatagagatttatactaacccctgaacctcgtagcactttatttggttctggggagaacatatttttttaaacaagagaatgcttatataggacagaggaaaaggtttgggttcagatggaattttggccttttctccatagatttgtttgaaaaatgctggaaagatccatgaaatagtaaatggctcaacaagtattttgaaatattttttaagtggcaggcagaattctaagttgtaatgtgtattgtatttgagacaatttaatcttatatttttgaggatggatttgcattgagaactggttaaaaaaaaagatgggagttgatatgaaatttaggtatgaattagtaagaaccagtgagttaatatgagctatagaatatagagaaagagttcaggtgattttcaatataaaacttatattgatttttattttcttttagcagctagtttgttggaggaatgtggcaatggagtacagatttcctgcagttttggatttctactcagactaattattagcaataaacatattagttcttccaaatattctatatggattcaaaaattagagcaaacaattggatgcaagtgattaattggaataccagaaatattagagtatttggttgttttgccatcaaaaatataatctaaatatgtaccataactttgaattttattttagaaacttctaaattctcaagataaatacaaatttgatatatttatgtatagttttcaatagtttgctttaaaaaggactttaaaaagcatgtatttccaaagcattgttcatgtttgtgcacacacaaaaataaggttcttccttcttgatagtagaacaaaaatattaggtgctgtgcatacaacttagtatcattttgtgaaactctcaggccttatatctcttgggattttaaaattgtaatttacatgcaaaatcaacctttgggcatttaaaggataattgtcgaatttaaggattacctaaatcctgtgctttaacttctgctgcttctgtttattgtttatttctttgctaattgttatcttctcagaggaagaagcggggaagaaggagagccttcaatacaaattagttaattttattactgatcgtattttgctaaagagtgtaaacaaaatgattaaagtgggtttaacatgaggtgtggctttcacatagtttttgttttccgtgttcctggatcatcaagaattttctcttactttgggctcagttttctagtagtcttcagtagaagtggctattgtgggaactttaaacatttttaatgcatttttatatatagtgaggttagctctaggtaaaaacattaaattgtacagcttgtattcagtatgttacccatttttcctaagagtttgtttttcttcttcaggttcctcttctcccctttattccttcccttccttcctccctctctttcttcctttaatacatacttactgaacttcaactatgtgctagaatgtatgtcttcatcttaacagtggagccctggaggaaatgttagttttcatggacaactaagggcacaatcagataactgcccatacattcagcggactggttttggtgcaagtgttaagtctccttctctcagagtcattatgttagctagggtaggttacattcctgtaacaaatataatcaacatgtactagcacaagcaaagttgaagtctttctcaggaaatagttcccagccaatgtttcaaattgggatgatgggggtctgtaagggaccaaggctgatgtatgacttcgtgggtctaagtcatttcggccaatgtaagaagatacaaagagtggagacctgagaacagtatgcataatttccattcacattttatagtcacatatccagactaactgcaagggaaactgagaaaaggaatataggcctgtgcctagaaagaagcggggaatgaattctgatacatgtacattgtcgtggagccatagtcatggatgagccagaactaactagtagttttcacaaagatattctggttttaatttaaaaaccttaaaaataagttctatgccttttttcctgtttacaaaaaaatgttcctagagctgcgtagtatacttattatatatataaacaatttagaagaatgctaaatctgcccctaatcacatagccaaggggatgttataatattgttgtatttttggccctttacatgcattttgaaatataatagggatcatactacatatagttttggattttttatttaaaactaatattttgagctttttccatgccacagatgtacgtgaaaacattatttactatggccctacagatttttgtcataaggatatactgtaacttaattataaatttattgatggaattcatattttcattctttagtgtaagtatgtttttagcgaataacttttatacataaatgcatacctgcatttctgattattagcttagttgacttggtgactcaaaggatgtgaatatatctacgtttcttaatatacactgttcatttgattttcaaagaatttatgccaatttaccttccaaagaccaggaatgaatgtgcccacaaagttgtgggcaattaccagatgacccagaaatttcattcttaggtattagcccagagaaataagaacttatgatcatacaaaaacctatactggaatttgcatgacagctttattcatattggctaaaaaccaaaagcaacccagatttccttaactgggtaaatggttaaacagcctgtgttacatccagatggaatactactcagccataaagaggatggagctattgatgcatgcaaaacttggattcatctgtagagaattgtgctgagtgaataacgacagccctgaaagattagatactgtatgactcaatttatataacattttttaaattaaaaaaagaacaggttagtggttgccatgggttaaggttaaggggaggagcaagcagggaggtgtgtgattataaaggggcaacaccaggactctttggtaagggaacttttctgtctcttgattatggtggtggatatgcaaacctacacatatgaaaaagttgcagagaatgaaaagcgtacacacacacacacacacacacacacacacacacagatgagtaccaccaggaaaatcagatagatgatagattttatcaatgtcaatattgtttccaatgttgtagtacagtttttaaaggtgtaaccattggagaaatgagtaaagggcatccaagatctctgttatttcttgcaactaactgcatgtgaatttataattatctcaaaataaaaagtttgattaaaatgtagtgcacaaaatttattatatagcttattatcttttatataataaggttctgttgtttgatgatgtaaacttttctgtaattgtaattaggaaattatccctttcattcattccgcactattcctggttggtatttaaatgttctgagaccttttcttgtttccatgcccaaattttcttcttttactttttagtaattattgtgtacaacagcaattccaaaaatatttcttcaccttcttctagcctttttgtggaacatatgatcccaaatatttcattgacctattttgtagggtagctcagaccccagcctattttttacatttttatttttgttttctttaaatgtaattgccaaaggatttctggaccagccctggttgatttagtgcctaaagaactggtcgtacctatttatatcctcttggtcaataagttatgctgttaaagtgttcttttattttattacaaaaagaatctgattttattcacttttttatttaagagttgctctaaataggataattgagtaatgatattcctcacatcttcagtttaaaaccctttatcatcctctctctctgcaaagtcctttttttctttattcatatgttatttatcacttgtttttttgtcaccggctctcactccaatactcccactcaattttctgctttatgtataggtatatccttgtaaaatttgtaacattttgcatgcatttcacatttacataaatattattgtgcctatatatctttttaagtaatttagttatataaagatctctattctacataaatttcatatgtttgttgagttcttcagaatattcaactagaattttgattaagactacgttatatttatagattaatttgagaaaaattgagtttttcactatgtttagtgcatgcctagtaaagaaaggtctaatgataagcagtaaaattgataatatctacgtttcctttctcttttaagattttaatgagggaccccaatgccatttgcctaatatctctttgatggtgcttttagtatccagactttaattatttttactacatttggtgtacatgaactaatatttagatgtgtgttatactactaacactgaagtttctgttataatcctaataaagttctttcattattgtatttggattgtgtaattttcatttgcagaaatctgccagaaagatttgaaactctatttatatcttcttgagattgtgtggataaacttacatgcataaagataagaattgctgtgtctccatgcacacatatgtttattgcggcactattcacaatagcaaagacttggaaccaacccaaatgtccaacaatgatagactggattaagaaaatgtggcacatatacaccatggaatactatgcagccataaaaaatgatgagttcatgtcctttgtagggacatggatgaaactggaaatcatcattctcagtaaactatcacaaggacaaaaaaccaaacaccgcatgttctcactcataggtgggaattgagcaatgagaacacatggacacaggaaggggaacatcacactctggggactgttgtggggtggcgggaggcgggagggatagcattaggagatatacctaatgctaaacgacgagttaatgggtgcagcacaccagcatggcacatgtatacatatgtaactaacctgcacattgtgcacatgtaccctaaaacttaaagtataataataataaaattaaaaaaaagaattgctgtgtctcagccatagctagaagaatcccagacaaatgaattgtcaccctaaaaaaagacatcagagaaaaatatctcctaatacaatgaatgtatttgggagtaagcaaaaaaaggattcaggcacaactatggcaagccataggtgcacctgaagaggggagtggaaggggaagcttttatttggcaaaaagaagttaatataagctgcttggaaacaacagttctttggttcaggaggctcagaaatggagttggtgtcagttcatcagtggagctgctgttactaggcaagtggtctttttattttaaatttaagttctggggtacatgtgcagaatgtgcagttttgttacttagatatacacgtgccatggtggtttgctgcacccatcaacctgtcatctatattaagtatttctcctaatgctatccctcccctagtccccaaccctctgacaggccccaatgtgtgaatttcccctccctgtgtccatgtgttctcattgttcaactcccacctatgagtgaggacatgtggtgtttggttttctgttcttgtgttagtttgctgagaatgctggtttccagcttcatccatgtccctgcaaaggacatgaactcatcctttttatggctgcatagtattccatggtgtatctgtgccacattttcttaatccagtctatcattgatgggcatttgggtcggttccaagtctttgctattgtgaatagtgccgcaataaacatatgtgtgcatgtgtctttatagtagaatgatttataatcctttgagtgtatacccagtaaccggatttctgggtcaaatggtatttctggttctagatccttgaggaatgggtgaacacccacaatggttgaactaatttacactcccaccaacagtgtaaaagtgttcctatttctccacagcctcaccagcatttgttgttgcctgactttttaatgatcaccattctaactggtgtgagatggtatctcattgtggttttgatttgcattgctctaatgaccagtgatgatgagatttttttcatatgtttgttggctgcataactgtcttcttttgagaagtgtctgttcatatcgttcgcccagtttttgacggggttgcttttttcttgtaaatttgttgaagttctttgaagattgtggatattagccctttgtcagatggatagattgcaaaaattttctcccattctgtaggtttcctgtttactctgatgacagtttcttttgctgcacagaatctctttagtttaattagatcccatttgtcacttctagcttttgttgccattgcttttggtgtcttagtcaggaagtccttgcccatgcctatgtcctgaatggtattgcctaggctttcttctagggtttttgtagttttaggtcttacgtttaagtgtttaatccatcttgagttaatttttgtataaggtgtaagcaagtgttcttttaaaagcatcttatacgtgttgctgcagttctaaagaataactagtgataaaccttgtcacagaaatctgtacatacatgcaaaacataggtcatgaaaagcatgagctgcattaaggacatgaaggaatttctcatggggttattttaggaagtttttgagatagttcttatctcagacatgtgagcatgagctgccctcctttgtgctttcctggctctaatttgtttagaccggccatgagtgattccatcctggtatctgcaacttcacagggtcttggcttatttgggcttcttttctgtcagtgataagtgcttgatcccaattctctaagtgatatggactgagttgtgttgcccccaaaagttatgtgttgaaggcgtacccttcatgtaactgtattggagataaggactttaaagaagtgattaaggttaaatgaggtcataatgttggagccctggtctgatagaactggtgccctcactagaacctgacaatgctaccatctgatcttgtaactttcaacttccagatatgtgagaaaataagtttctgttgtttaagccacccaatctatgatattattgcagctttatctgactaagacactgtctgacattagagtgattgtcatattaattaatgctctgggagatagaattatgagtcagctttctattagaaatgattttataacagtctatttttgttctagggtgtttaggcattaaataaagtaaatgatccattggttgtatctttccatgtttgccgactcttaatgaactacatgaaatggcaactaccttttctagccacctcagtgccttacattcatggttaggcattatgcatcatttcctgtcttttctgacactcaggatatgaaattattttgccatgtaattcaattaggtcactgaaacactttgtgagttagacttctgtaatgcaaaatcgtgttgcttatatatcttcattttttttcagagcaggagtcatttcaagagtcagaactacctagaaagtaagataattacacttaattattttttaccaattggcatcatactttttttcctcaaggagtcatgtcatagcaatctgatgtttctcctctctgtttttttttgagctctcactctcagattgaatatattaaagttgtagtagattttggacctaaataaaatatgtattttctcataagtgtgggaagaatttttgtcttttatttagcttcatttaacatctacctcagtgcctgaaacattttaggagactagatggatagatatttgttgtacattaaaaaaagctttaaaaagcccatcgtatcaaaattaattcatgtaaaaatttgaaacactctgaaattgattgttaagtgctcctcaaagagtaattttggcaaacatctccaaagaagttcatgaaaacttctgagttactgagacatagatgtttactaacacagtaatcagtggttacacattctaaacatttaatcaatgtaatggaatattgagataacattataggaattacacaattccattgtcattgtatgtaaggaaaacagtgaaaacttcttatgataaacactttcagtatgttacttatctccattttggatgagatacaggccaagtcctatatatattttgctgctttgtggataattagccgcagctttgttcagaaaaggtggaggtaagtgaggaataggtatcagacatctatatattgttttataaatttttttgtaaaacattattatcagtagctctggctttgtggctgctgtcaaataaatttggttacttataaataactttaggttagactatgatagctatgagaaatttgatggctttctgtttagtgaagcagagtataattctggttattccaatgtcctttatttagccacaggttgtgatttaatgaaaggtttaggagctggattggaaaaatacttcttaccttctaagaaaatgttccacatcagctatgttatctttatattattagctgggaattatgagctgctatgttgctactattcttacaagaaggcttgcaagcagttgtagacaattttattttttgtgaccattctgtggcttgatggtaaattacaagagaggtaataacacttcacagaaatgtctttatcactttctatcatcttccctgcccttggcagtctcctttgctatttagatgacaatatatactcagagtttgtattttaaaaagcatgactctctgttcggatagtatctagcaatttgaaaccagatagcaaaatcattttaaaaaaccccagctttcgtttgaatggttagctacagattcaaccagggcctgaggactatgatgccttaaagtggaccctgaccaaagacttcaaggtaaattctatgggtttattagttgtcttggttttatgttttggtggaatataatccacaagacatgtaaagctgaaatgtaatataaagaaattccatatcattgtttctctagagatagttcagtaaaggtcaaagtaaattgaatcaagatagtgaggcaatacagttgaactgagaaaattggatgtggccagacagcattaaagaagagtagaatgaaattgactggctgtgaaggcttcagaaattggtgatgagttttttttttatcatttcagaagatgtaataattattagataatatttatttagcattctgctgttgggactttggtggcatctttaaaaaaagattttacatatttattttatccttagaagtttacattctaaagaataaaatcagtgtttgagcacagtaagtcattggacatatttgaagttcagttagagttcttatatttgaaaagttttgcaagacatagattcataatcaagaggcatgtactgtcgtcccttggtatctgtgggagattggttccagggcctcccatgggtgccaaaatccacggatgctcaagttcttgctgtaaaatagtgtagtatttgcatataacctatgcacatcctcctgtatactttaagtcatttctagattatttataatatctaatataatctaaatgctacggaaatagttgtattgttagggaacaatgacaaggaaatagtctgtacatgttcagtacagaaacaggtttttaaaaaatattttcagactatggttggttgaagctctggatgtggaacccatggatgttgatggccgattataaatactttcactattatgatagaaaaccagcagcatgtgttgatatagaagctgcaggagatccagaagatctagctaagataattaatgaagacagctacactcaacaaaatattttcattgtggatgaaacatccttctattggaagaagatgccatctaggtaggactttcatagctagagaggagaagtcaaaacttcaaaagatggtttctcttgttaggagctaatgcagctggtgactttaagttgaaaccaattttcgtttaccattttgaaaatccttgggttcttaaaaagaatgctaaatctattctacctctactataaatagaacaacaaagccttgatgacagcacatctgcttacagcatggtttactgaatattttaagccaagctttaagacttaccgctcagtaaaagagattcctttcaaaataatagtgctctttgacaaagtaaatggtcacccgagagctctgatggaggtgtacaaggagataaatgttgtttgcatgcctgctaacataacatcatttatatagcccatggatcaaggagttatttcaactttcaagtcttatgatttaagaaatacactttggaaggctacagctgccatagatagtgattcctctggtgggtatgggcaaagtaaattgaaaaccttctggaataaagccgcaataaatatacatgttattgcggcactattcacaatagcaaagacttgggaccaaccaaaatgtccgtcagtgatagactggattaagaaaatgtggcacatatacaccatggaatactgtgcggccataaaaaaggatgagttcatgtccgttgtagggacatggatgaagctggaaaccatcattcacagcaaactatcccaagaacaaaaaatcaaacactgcgtgttctcactcatacgtgggaattgaacaatgagaacacttggacacaggaaggggaacatcacacaccgaggcctgttgtggggtggggggagggaaagatttaggagatatacctaatgtaaatgacgagttaatgggtgcagcacaccaacatggcatatgtatacatatgtaacaaacctgcatgttgtgcacatgtacactagaacttaaagtataatttcaaaaataaataagaaaaccttctggaaaagtttcatcattgtagatgccattaagaacattgacgattcatgggaggtggtcaaaatgtcaatattaacagaaatttggaaggcattgatttcagttctcagagataactttgagggcttcaggattttagtggaggaagttactgcagatgctggtgaaaatagcaggaagactagagttagaagtggggcctgaagatgtgactacatagatgcactctcacagtagaacttgaacatatgaggagttgattcttatggatgaacaaagaaagtggtttcttgagatggaatccacccctggtaaagatgtgtgaacgttgttgaaatgacaacaaaggatttaggatattacataatagggcagcagcagggtttgagaggattgactccaattgtgaaagaagttcctctgtgggtaaaatgctatcaaatatcattgcatgttagagagaaatctttcataaagtaagggtcaatcaatatggcaaactttattgtttcaagaaattgtcagaactacctcaaccttcagcaacaaccctctgatcagttagcagccaacaacagaggcaaaacctacaccagcagaaggattacaagttgctgaaggctcagataatcattagcatttttagcaataaagcattttaaagtcaaagtatgtttgtcgcttttttagacataatggtattgcacacttaatagactacagtatagtgtaaacataatttgtatatgcactaggaaaccaaaaaaattcatgtgactccctttattttagtattcaggaacctaacttacaatatctctgagctatgcctgtacagaaaaactggatatatagaagatagtttcagaaattattcagaaaaggaagcttatcattagaaacacacgagtcttattcagatttactgcagatattacatgcctattcaagtataaatatgtttacttcgttaaattggcccacgcaattatgtcttttagattaataattatgtttgttttgtggctgggagaggtggctcatgcctggaatcccagtacattggaaggccaagtttgagaccagcgtgggcaaagtggcaaaaccccgtctctacaaaaaatacaaaaattagctgggtgtgggggcttgcagctgtagtctcagctacccaggaggctgaggtaggaggctctctggagcccaggaggtggaggttgcggggagcagatatagtgccgctgtactccagcctgggtgatagagaagaccctgtctcaaaataataataacaataataaaattatgtttgttttgtgaaaacatttttgcagttatcaggcatcttacattgattggctacatatattatagattgttttttttttttttttttgagacggagtctcgctctgtcgcctaggctggagtgcagtggcctgatcttagctcactgcaagctctgcctcccgggttcacgccattctcctgcctcagcctcccgattagctgggactgcaggcgcctgctaccatgcctggctaatttttttgtatttttaagtggaggcaggatttcaccatgttagccaggatggtctcgatctcctgacttcgtgatctgccctcctcggcctcccaaagtgctgggattacaggcgtgagccaccgtgcccggccatagattcttaatgtagggcatatgtgtgtgtttcagaggctctatgaaagccctgcattattaatatgcaaaatttggcataggattctttttctgggatgaaggttcatcagattatcaaaagaatttcttggaaatacttagtctcaattattttgtaattaaagaacaactataaatattttaattctgtggggaggaaaatatgatttttaatgtaagttagactaaacaacaggttgcttgaattttctctctgtagttgttgttctgatattatgtagacaaaggctaagtcctttaattatgtctaaattaatttacaatacatgaaattcacccacacttgttttatttatctctccatggaaacagcatgctttgagctgctactaaatatttcatatgcaggctatttatacttttatatttaaggatatattctttagactctattatttcatttaaactgtttctggaaatgcagtaaagtttaatattctttttaaaatgcattttaaatgagtcagcttttcattgtatggattgatttccttgccatcattcactatcgtgttttttgtttggttgtttcctaatgttatttcttaatatcttcctcttgcaaaaatttctcactttgggggcctcattacaaagtattttctatgtacatgttccaccagattttaaaaattttaatttttaaaggtataatttacatacagtcaagaacccaaatcttaaatatgtggcttaataacattttaatagttttcatgttttcgagtagttttaggttcacagcaaaattgagtggaaggtacagagatgtcccatataccttctgtctcttcaacaggcatagccttctattatcaacattctctaccagagtgatacatttgttacaattcattaacctacactgatacatcattatagtccaaaattcatagtttaaattagagttcacttttagtgttgtgtaatctatgggtttggataaatgtataatgacatgtccaccattatagtatcatatggaatattttcactgccataataatcctctgtgctctgtctattcctccttccctaccccttaaccccagatagcagctattgacctttttactgtctccatatttttgttttttccagaatgttatatagttggactcacacagtatgtaaccttttcaaattgagttctttcatttaattatgcacatttaatttttctgcttatcttttcatggcttgatagcttgatagcccatttctttttagcactgaataaaatttcattgcctgcatgttcagagtgtatttactcacctatagaaggacatcttggttgctttgagttttggcaattatgaataaacctgctataaacatccattgtgcaggtttttgtgtgcatacatgttttcaacctatttgggtaaataccaagaagcacaattgctgtatcatatggtaagagtatgtttagctttgtaagaaactgccaaactgtcttccaaaatggctgtactgcttttcatttccaatagcaatgaatgaaagttcccactgctgcctacccttgtcagcatttgatgttgtcagtgttctggattttggccattctcataggtgtgtagtggtatctcattgttttaatctgcatttttccctgatgccatatgatgtggaacatatattcctatagttatttgacatctgtgtatcttctttggtgaggtattttttaagatatttgttctgttttttaattgggttgtttccctaatattgagttttaagggttatttgtctattttggataataaccagatatgtattttgcaaatattttctcccagtctgtggcttgtcttttcattctctttatattgttttctgtggagcatagatttttaattttaatgaagtcaagttcatcaatttttttaaatacatcatgcctttgtcatcttatctgaaaagtcattgccaaactcaagttgttctatattatcttgtatgttatcttccaggaattttatagttttgcatttaacatttggtctgtgatccattttgcattttttgtgaaagatatgaggtctgtatctagattcaatttttttttttgtaattcgatgtccagttgttctagcaccatttgttgaaaaaaggtatctttttttcattgcattgcttttgctcctttgtcaaagatcagttttactatatatatatatttgtagttctatttctggggtctttattctgttctattgatcaatttgtctattcttttgcaaataccactctattttgatttctgtggttctataataagtcttgaggttgggtaatgtcagtcctccaactttatttttctccttcaatatcgtgttgtatatttcaagtattttgcctacttcatgtaaacgtaagaatcagtttgttgatattcccaaaatagtttgctgggattttaacagagatttcattgaatctatagagcaagtggggaagaactaatattgtgataatattgtatctttctatttatgaacatagactctctctccacttatgtagtttttctttaatttctttcatcagagttttgttattttcttcataatgatcttgtacatattttttaggtctataagtattttattttggggtatgctaatgtaaatgtattgtatttttaattttaaattttacttgttcagtgctgttatacagaaaagtaatgggattttgtatattaaccctatacactgaaattttgctataatcattttattagtctcaggaatttttttgttggttcttttgaattttctacatagatattcatgtgatctctgaacagagacagttttatttcatcctttccaatcactacacctttttgtcctagttcatttgttctgtgataacacagtcttgataatttatgaagaacagaaatttatttctcacactttggaggctgggaaattcaagatcaagacagtggcaggattggtgtctggcgagggatgctctctgctttcagtatggtgcttccaatattcctctttgagaggagaagaatgctgcatcctcatgtggcagaagggatggaatagcaagagagcacttttttcacccttgagcccttttataaggatgctaatcccattcatgagagtggattgtgagataatcacttccaaaggccacacttcttaatactgttgcattggagattatgtttcaacatgtattttggagaggaccacattattcaaaccatagtaattttatttccctttattattttattagctaggacttcagtacaatatttaaaaggagtagtgagatggtacattcttgccttgctcctcatcttagtgggaaagctggttttttaccattaagaataatgttagctgtagagattttgtagatattctttattaagttgatgaagttccccttcattactagtttactgagagatttaattgacgttggattttgtcagatgctttttatgcatctgttgatatgatcatgtgatgtttttcttctttagcctattgatgtgatggattacattaatttatttttaaatattaaactagacttgcatgcttgagaaaaatactacttggttgtggtgtatacttacatttatacattcttggatttgatttgtgaatatatacgtatatgtgtgtatatatatctgtatatatgtatactatatatatatattttttttttttttgagacagagtcttgctctgtcgcccaggctggagtggcacgatcttggctcactgaaaccttcgccttccaggttcaagcgattctcctgcctcctgagtagctgggattataggcccaagccaccatacccggcttgatttgtgaatctattttgttaataatttttgcatttatgttataagatatatcagtctgtcgttttcttttcttgtaatgtctttgtctggttttgttattagggtgatactggcctcagaatgagttaggaagttgtattagtccattctcatgctgctaagaaagacatacctgggactgggtaacttataaagaaaaagaggtttaatgaactcacagttccacatggctggggaggcctcacaatcatggcagaaggtgaagcaggaacaaaggtatgtcttacatggcagctggcaagagagcatgtgcggaggaactgccctttataaagccatcagatcttgtaagacttactatcatgagaacggcatggaaaaaacctgcccccatgattcatttacctcccatcaggtcccttccttgacacatggggattatgggagctataattcaagataagatttggtggggacacagccaaaccatatcacaagtattctcatcacttctatattatgggaaagatttagaaaaatggcatggtataatttatttcttaaatgtttggtagaattcactagtgaactcatctggcctgggtcatttctgttttggaaagttattgattattgattaaatttatttaatagatatagagctttacagattatcttttgtgtgagattcagcagattgtgtctttaaggaattgatccattttatctaggttatcaaatttgtgggcatagagtatttctttgttattcttgtaatgtccagagaatgcatagtgatgtctccttgtttattttggtcttattaatttgtatcccttctctttttttcttagttagcctggctagaggcttattagttttattaaccttttcaaagaaccacgttttgttttcattgacttttctctgtttatttcctgttttcaatttcataggtttctattctgactttatttcttttctcaggccgactttggatttaattttttcttctttttgtagctttctaaagtgaaagcttaggtaattgatcttagatcttttctccttatatatgcattcagtggtgttactctctttgcactctttcactgaatcacaaattttcctaagttgtgtacttatttttatttagtcaaaaatatttttatatttttattcagatttcttttttgacataggttattcaagtgtttggggattttttagctacctttctgttactgactcataatttaaccccatttcaagacattgtaagacttctagtcttttgaatttgttaaagtgtgttttatggcccagattgtggtttagcttggtgaacattccatgtgaacttgagaataatgtgtattctgcttttgttggattaagtagcctttagatatgcattatatccagttgattgatgttgttgaattcaactgtattcttactgatgttctgcgtgttagatctgcccaattctggtacagtggtgttgaagtctccagctgtaatagtggattcctctatttctccctaaacttttatcagtttttgtctcatgtgttttgacactctgttgttcggcacatacacattaaggattgttatgtctttctggaaaattgacccctttatcattatgtaatgaccctcttcatccctgataactttacttactctgtttcttgacctgttgggtatttctcttcctccatgcggaaggctagagttgattggagttgggtatttcctttcacctgggtcagttaggctctgataaaatcctagtaggataggcagtgattacatatattctcctgagggcagacatttttgagaagtacaaaatgatctggtgtatttctaaatgggtcttttcccccttcccttgtgggaatcataagggaattttcctctagtattcactgtgagaagctagtagagctccatgaagtaataatcacaaaagtgtgcagtctccgggatgactgggtgcccctggagtttttagtctctcagacttgtcgacaccgagcctccagtaatttgtaaactgctgttcaggtttctctactgtggcactggttcccaaggacgtttttgcttgtgggctgctgctccagtaagtcattattctctgtatctgcctgtctttctctccagttttaggggcagtggtttgcccagtgacatcatttctcttatagatttaagaagagttgctaatttttcagtttattctgctttttacttattgttaggatgaagtggtgacttccaagtttcttacatgtgggaccagaaactggaggccaccaccatatattttaaaattatatagttatgttgtaccctataattttatatttcagtataggtggtatatatatatttggcctatgtgtgacagaaataagaaacaaacagaatttattggattatttatttccccaatcctttaagtttttttttaaagactaaattattttctctttccttccatgaaattttgtacattttgatttcagcaagatgcctttaaccaacatgtttttgattcagtggttacaaatagatatgtgctacttgcctttaaagtcaagttaaagtcctttctggcttagccaaaaattatgtcatatatatgacgctagttccctgggactgaggagatgtttaggatgatcttgtaagatatttttctcgttttgatttgcacacttgaaatatcaaaaagaacagatacctttaaagctccccttaaatattgttcctgacattttttgggaagaagattttcctatgtgaacatctttccttgcaggaaacttttttttgttgttgttattgctaatgttgccttataaagaaatacatccgccccacttttctagtctctaaacacatttaatggactggtgaactaaatacaattatttaataatcacttctaggaataattacttttcagtgttggaaaggactttaagaattctcttgtatgtaaataatggctttaaccaagtttgctgaatacaagtttcttgcaaaccccaaacattttctacacattggataattttcatgccaagacccccatcacacaatatatttttacaatgacttttaaagcattctttactacaaggaggaaataaagaaatttttgaacatcatttactaaaatcaggaaaaacgatacacaactattttttggaacattctttgttgaaggaggaagggcaataaataaacttggaaactcctgtgggtgcgacgctagggctagctaacttgatataagttgtaagaacaaaggtaggaagattgacacatttcaggactgggacactggcaagtttttgggaaagtaaacatatcaattaaaaaagaaaagtaacagttctgctataatttctggtcttagttgaaagtccagaaagcaagaaattattacaaaagttcaattataatctggctaggatgatgaccgcaaatatattacaggcccagaatatgagagaaagatctgaaaatgagagatagcattggtcaaagggaaatggccctaaatttatagttattatttactgtgtcaccatagacagctgtatatgctatgaacaaaccatttggaaaatggaataagcaacaataaataaataattttttaataaataattttaaaatgccatttacaatagcatcaactactgtctgggaaatacttaggatgccaatacctaaaataatagatgttcaagtcctctataccccaaattgcaaaattttgcagagaaattaaaggagacttaagtatatattgaaatatactatgttcatggatttaaaaactgtcattgagatgctatttctctacccactgatacataactccagtgcatcccaataaaaattcagctgcatttttgtagtcgctgctgtctttagaatttaaatgagaatacaaaatgcttaggttagctaagacatttcttcaagaagagaacaatgttagagaacaagcaagacccaagatttactataaactggcagtaaataacacagtatggtattggcataataactgatagattagtggaacagaatagaaagttcggaaataggttcaaatatatattgatttttgacaaaggcaccaaagcaattcaataaagaatagaagacctttacattaaatagtgttgcagtaactgagtatttatatggaaaaacaaacttgaacctatctcatataaataaacaaaaattaattcaagatggatcatagacataaatacagcttctagagcaaatcacaaaatatcttcaggatcttgaaaaaagcaagacatttttaacagaatatagtaggcacaaacaataacagaaaacaattagaaattaaatttcatcaaaattaaatattttcttcatcaaaaggcagaaagtgaaaaggcaatccacagacagggagcaaatatttgcaataaatattcctgacaatagacttgtatctagagtacataaagaattactataaatcaataaaaagacaattcagtttaaataaaagcaaaggcttgatcagctattttttaataaatggacaaaaaagtatagaaaaagatgcttacattatcattatcaaaaaatgtaaattaaaaccacagtgacataccactaccaatggctcacattggaaagactgacaatactaaatatcagcaaggataaggagcaaattgaactctcttactttgctggtggaaatgtaactggtataaccattttgcacaactatttggcaatcactagtaatgttaatcatacttctaccctatgacctaacaatttcattaatgggaatatactgaagggaaataggtaaaatgctcataaaaagatttgcacacaaatatttctaacagctttatgaataacttcccaaaccaggaaaccacccaattgctctttaatagggtataacattataatgttctctatttatattttgtcatcattgcaatgtggtggaacttcagtagtttctctaggcttaaacttaaagagtcatcttgaatagaagtctaatgttttttaaatgatattttctgcagtgtttatgcagtacagtgagctgtgaagattgcagttatatccgaggtggttgtgtgtaatcaactagatgaaattttgtgtaaaaattgattggatagcataatctcctagtggttctattctgtggccagcaggaaaaattttggtaagtgtggcaggttaaggtcatgaaccgtcacatacaggaagaagtcagaatcgtgaatttcccaaatagtgagtacagaaggcatgtagcaatggccatttactgagccttcttgactagaacttaagtttcaggtggaagaagtaaagtcagtcaaagagccagaaccagcatcctgaagagtatcagcagaacatcaaggaagggttgtgctactgttttcctcttgatattattataggtagtgagattgtgaagcataagaaaggagaagttacttaaattagctagaacaggttgctggttatgcaattacaagtgcacttaagactagagaaacgtttactgaagagttgggttttgatgaagtacccttatagcatatagataataaattcacagattttgaacttaaagcaaggaaaaacatacagtagcagatttaacgggcaatgaagataagataacaatttattactacttaactggaatacttaaaatcagaagaaagggcagcatgggccaggtgaagtgacaaattaggtgaggatcttcaaatacactatacagagatgcatcattttagtaatgtgaaggtctgagaggttaagagatttattaattatataaggtggactcttagtacagaagtttttgcaaacttgcaattttggtaattgcttttctattataaataaaaatcagcattaaagaaccctctgaaatacattaagttgcgtaatgccaaaaattaatatgctttatcacactgaaggaccttggttgtaatataggcttcagtttctttagacacctttttggcaggtatgtaaagccatatgcacaatatgtagttgactgatactgtgaaatgactggaattttattggacagtgggaggtgaagcagccaagacatataatagttttgcagacatctcaagagatttcaaaatgaagaaaaaacccaaaagttttagcacttgtgtaaaataaaatcattttttatctttgctctgaaatttcttcaggtttcaaaggtcctgtaataaatgtgttagcactggatttttccttgctgtggaagtgagctgtgagacaattgaaatagattttggaatgcttgagacgtgaggggttggatttaagcagatctgagataggaagtcaggattctctatggtctcttcagaagtttatgagactctgttatgtggtcatttattttctgtcatttgacttttgtctgatttgtcttgaagcttctatctccacaacttttctgggcacttttttaaacacacaggaacttaccttggagaacattttttaaaaatataccaaaaatactgtgtctaaacttctgagaatgtataatgtgattgtcttctgaaaagtaggagttaaagtacgtttttatccttgggaatattgttaaatgactaatagaaagtggaaacctggaggcatggcaacgaaaagtcatttaaaggaaccagtttttatttatgaaatgcttactatgttaagagatacagtgcattgtaatttttttaatctaatggacaatttttaaggttttttttttctaaatagagaataccggattaacctataaccttctaagttgtacctttgaagaggcttttcttgctatgtcttgaatagccattttgtattatctatagctctccctggtcttcctgtcctcaagaagtgttaaaataatttgttgttctaaggtagagaatgggccaaagtaggaggatacatcaagatgtctaattggaaaggaaatcagattgcttttccagtgatcaaaggaagtatagcagtggagcaatgaacttttaaaaatgattcttatgggacaaggaaaccattgttgtaattttgttattcagcaaccagaaatgatgaattagatgtttactaaatcattgcacttattgtggtacaaacgcctgttggctataaaggatagctcttaaaagaaaccagaaagcaagggaaacaaaaacaatcgtgtcactttcccagcagcatgtgatgatgaatttctcattcaaaccctgtgaaataaatagcttgctcattcaaaatcatttttttttctttcttttttgagatggcatcttgctttgtcgcccaggctggagtgcagtggagtgatctcggctcactgcaagctccgcctcctgggttcacgccattctcttgcctcagcctcctgagtagctgggactacaggcacccgccaccacgcccggctaatttttttttttttgtatttttagtagagagggggtttcacggtgttagccaggatggtctcgatctcctgacctcatgatccacccgccttggcctgccaaagtgctgggattacaggcgtgagccaccgtgcccggcctcaaaatcatttttggttctcagcatccttaaaatacttttttagacaagttacccagagaatcatctgtgccctgtgtaggcacaggtgattgttcattcccccaacccccactcttcagagagagactttgtcaggcaagttttgaagtgatttatccaggatcactgtggtaataaccttcaaagactggtaaagaactaggtaggactctagccctactggccaaagatgaagttgacattataaattgcaaccgttgacaatctctgatgtaataatgggaatataaggctggaattaattctgattcaagagacctaattccctggcttttaatcagtgtataccactgaatatctctacctaccttagtttttatgccggtcatttaacctaagcatcttcatctctgtcaaaggctcctatttcttctcccagtagcagctgccgttgtaaacaaataattaagttgaaccagttgtaatgattgttgggtagccatgatacaacataagggtggcaggaataagggactcaatagtgtgactcagagtcattgaagtgattggcatgaggtctcagcagggctttggtggctggcaaaaagcatggagttggactggatgcctaagtgcagttttggtggagaacgaacagtgcaagaagttactttatggataaaaaagatgactttcagattttgagatttaatatatctttgtccctggataacattatctaaatttagaggccatgtaagtggagaaaggaagataaatgaagtcaagaaactctgacaacagggtgaatagggcagattgccccaaactaattaactcatcagtcagttactgaacaccatatacatggtgtaaaggatcaaataaattgaaaaacatactatttatgtgctgcaggattgggtggtggcaggttttgaaaaactgatgactaatatactcgatgattataatagaaatagtgcctgctgcttggtaggtacttagatttttatcaaaagaataaatttatgcatgaaatcgtaagaaggggcaacaagcagatgcatgtggaagagtgtcatggaaagacactcagaggagataagatttgagttgaacttgaaaggatagttagccatcagcaaggtagatataggggctggagtgaggaatttgaagcaaaagagatatgcctctctgtacaaaggcagagatgcagggtgaggctggagtacaggatgcatgcagaggaggaataaaagtgcgcccttagcaacccagaattattatttggactttgtcctgaaggaaatagaaagccattggaggactctaagatggactgtgataagatcaaatttagaaatatgatttctggtgactatctttttgacagtttagagattttgaagagggtaatactgtgggccttttggagtattccacgttgaaagtgtctgtcctactagacagttgaatagtcatggtcttttattttgtttttgttttatttcaaattaaacatgaacaaatttatatttcatatagtataaatatttgtatatatttatgtttataaacagttgtacagatcattgtagataacataagcacacactttgtatatgtgtatacaaatacatatacaaatatcatatacatatgtggtatccagataggatgaggtttgtgcatgagtcactgaagacccaaaataacagaagtttgtatttctttcatgagaaagaaatatgtaggcagtctagagttgttatttgtgtttcagatatctagacaccttttatcattttgttctgcttcttatagcctgtaacttttccccattgcccaggatgtctgcttgagtttcagcattatgtatgcattccaattaacaggaaggaggaaaggatggaagactttaaggacacttttactataaagacacattcaacatgacattttaaattatattccattggtcagaatttagccctagagccttgcttagctataagaggggctataaaatattatcctttctggatggcagtgtacccacttaatagtggtggctctcttgtgatcaagaaggggaagaaggaatacagcatgagaatgaactgtgtatgccagatacacgtagttatcctccttttccccagtaattcaatgcagaaaatctctctctctttttctctttctttgtctctctctgtatgtgtagggggatatatgtgtgtgagcatatttttagaagttcttccaatagggggaatgtacaatcaacgcacattttgtgggcaataataacattttataagcacaagtgttttttgaaatgcttgtgtttatgtaattggcttaatgtatactacatgtgatgattgtaataagttgcatttgtatagagctttaaaaacatttacaaaagtacattcacacttgttatctcatataatctatataacacttttaaggtaaataggatggtgtactatccctattttatatgtggggaaatggaattatgtggttcgatattgaaactaggactggtattcactgacccctactttagggttagtaatggaaggcaataatagtatggattttcgagaacagaggataattagaaaataatttgtattttaatttgaatgaatgtatgctagtggacatgaattcttgtcatttgtttgataaattagcattcgagaattttttcccacccacctgagcagtggtatcttggccatggtcagagcgtcccatgctgttttctcctcctaataggacagatcaattgtgtggtgctgctcagttaatgtaagattgatggataaatttactcatcaatcatgtatttccctgcaattgtaacatgcaaaagttgtctacaagttaattgttttctgacacattcattgtacaaaataatcagagaatcccactatctttttctgcaatattgctttgtaaaaacagagccctggtaaatgttatcaccataaaggcaaaatgaagcactttcaacacctgactgaaatcatggtgttttgagctggtgacgtacattgctcaaaaggacatagtttataatttctactccagggggcattcagattagtacaaagtacttttagcctcttatcgttgggagtaaattttctgaaggtacatttatcttaagaatagcaaagaaaaaagagagctattgagtggctgactaggccgggaattgagctacctcttttgaaaagactgaatttttacttagaaacccaagcaatattgttcaaattttaaactctcatttgggccagaatgaaactttgaccactaatgaagggttaaaacaaggtactctgatatgaagtgtctttttttgtttttaaatgggttaaaaattataaaaactagaagtatagcttcttgctaacattcattacctccagggacatttttcagtccatcaaacttctccattcagtaataccattattgaagactctctacttcttgaaataccttctttctttggtttctgtaactttactctttccttttctctttctaaccccttttcctgtgttttcttagtttactttgcaggcttgtgttcatccacccagccttccacgtggcttgttcccagcccttcctttcctctgtacacctctcaaacttcctagcattcttcccatgctctctctcactctcagagacattgtacgtgctattttcgctgtctgaagtatccttcccttgaatatttaccggttaacttctattcttctaatgtctaatgtaacatacaaacgttgtctacaagttaattggtttttgacatattcactgtgcaagataatcagagaattccactgtctttgttctgcaatattactttgtaaaaacagagccctggtaaatgttatcaccataaaggcaaaatgaagcactttctttctttcttcctttcttttttttgttatactccaagttctagggtacatgtgcagaacgtgcaggtctgttacatacgtatacatgtgccatgttggtgtgctgcacctgttaactcgtcatttatattaggtgtatctcctaatggtatccctcccccttccccatgacaggccctggtgtgtgatgttcccaccctgtgtccaagtgttctcattgttcagttcccacctatgagtgagaacatgtggtgtttcgttttctgtccttgcgatagtttgctgagaatgatggtttccaacttcatccatgtccctacaaaggacatgaactcatccttttttatggctgcgtagtattccatggtgtatgtgtgccacactttcaacacctgactcaaatcatgatgttttgggctggtgacgtacattgctcaagaggacataatttatattttctaccccagtgggcattcaaattaatacaaagtacttttagcctcttatctttgagagtaaattttctgaaggtatatttgtgttaagaatagcatatacaagcctaaattttattattagatttaaattagacctaaatgtaattatcatttgttcagagaagccttacctgaattctgatttataaaaattgcctggtatatctctcatagcatcctctagctcttcttcctacacattacatagtaagctccatggggacggaaaccattttgcttttctaacaacttaatccccagtgtccagtacaatgttcatcacacactaagtgcatgatatttttgaatgaatgaatgaatgaatgaatacattatcatagatacaaataacacattatgaaaatactgttgtgtaaggtatacacacatagataaaggcatccaggagtttccttatttattggctgaactgagcatcaaagcatagatgaaaaatgagagatcaatgtcaaatcatcaggttttcaggttgggatgtaggctttgttcttagtgttgtgggacttaaaagatgcaattgcgggcagaggaaagaatgaatttaagtggttcagtagtgttattttaattcccttcaataataattcactttctctagataccttcaatgtgtaatatcaaaggcaaatataatttttatttctctaaacacaggctcgtatgtagaagatgacatagagatattggaacacctgctacttaactaaatgaccctcaaaattcaattttcatgtgtttttctgatgagaatctgaatgatgggatgaggaattggggaacttctaacatgggttggttttatagtttcagaatgagaactgataaaatcttaatatcacgtctctaattattatgtaagttgactatattcttatatttcactaccaaatatactactcctttcccactggggacaaattttcttcttttggggacacattttgatggcaataagtgcatatttttgacatgtgtaactttctgtgaaataatgctggggaaattacagataactgttaaatgagggtcaacagtcatgccaagccctatatccagatagcttctcttatggattagatttataaagtcctgggagagtgctttgtgtctgtattcactagacattttaaatcttctaatacatgttttatcttactatagccattagaaaacggttcatgattgttcaaactttttttcctctttcttctctctttcaccctccaccccagttttgagctacttgttataaatcttgactccattaaattcttacaagaacattttggaagctgctgctattggggaaaaggtgcacagttagcaatcacctgaataattagattcatgtaaaattccattttgcataatgtaagtcctagcctactcctactgtgtctttcctttagaatctccacatctctacaaattatgtaataacctttagtaaatgctttggccacttagataatggtgatgcatctataaacctcccatctccagatgttatgtactgaaatgtagtgtaaaaaaactgagtcaatatttatttttcttcagcaaaatatataaaatgtgaagaaatgagaaaagagaaggaaggaaggaaggaaggagaagaaaagaaaagaaagagaatgagagcgctttttgaaaatttccagtggagaaaaaattactcatcatgctagaagccttgtaattgatagcccattgatagtctgggaatattctgaaggatttttgattgatactttttaaaaatattacgataatatttgtatcattgcctagtcatttatgtatgaattctataataatatccctttattagtacgcaacatttcagaaatcctataaaactaagtgtgtgttcatgcagagaacatttaaatcagtaaaatccatacatcaaattaatctggacaagtctttctaattggttgcaattggcatttactgtagagctttctttacattctcattttatttactgttgaaagtactgtggattacctctggggagaagaggaagaatgtagcataggtgacattttggtaacattttactgctttaggtggacagtcggtaaattggtattcattttcttattctttttcacttgtaataaatttaaaataagaatacaccataaggcagactttcatatgtaataaatttttaatgaggatactacaccataaggcagacttaatagtgactagttttgtgaatttgcaagcaagttgtatactcattctggatcttgaagaacttttggtaaaaaataaaaaacaaaaatagtaaatataataattcatgaagtcagagctttactgagttatggccatcttttgaggctactttagttctatgaccaatttagattatttgtaattcattcatcctttgaacatttggagtgtggctaatgtttatatgcaattaaccctatatgtaacattgcttcatatttatataaagttattataggacggacttccaacatttaaaagggatgtgccaattggaagtgaaagtattagttgttcactgtctgaacacaatccaaaccactggacaattaggttaattcagagaaaatagaatcataggatgctagagctggaaggaacctcagagataatttaatttacccctttcaattataaataggaaattattacagtccacagaagctttagtcctgcagttagttaatggaagagctagcactaaaactcaaatttcagagcttcctctctgcttcctttctactgtattggtatttcccaaattgtcatttccaaaattgttcatgtgagtgaaaccaaaacaaacaatcacaacaaacaacaataataaaaccaggattttgtggcacagtaactttttgaaatattgcatcttgtatatcccttgtggattcacaatgcactttaatatggtaaaggctctgagaaaccctacagtaaagaaatctatgtaaccatttaatccactcttccccaaattttttgacaactgaacctcttctatgctaaacaaccagtacgttttaagaaagaaagtttggataatactatgaaattagattgtttattgttagcatgcaacttgattatatatgccatgccaaacccctgttgatttcaatagggatagcactgtgttggataaagaagaggataaaggagaaacttggatccagtgaatgagacgtggggtttattcaggggacttacatacagtgtggtccagcggcagtgggctggacaggagaaccactacagtttgtaaaaaaacatgcagtcttcacttagcaccctccccttggcaaccttcacgtggcaaccatcatttaaccccaaacaaaaggccttaatctccctgtatgggcttgcattccacaggatgggtcaggggtttagaggttccttatagataaggaatgaatcttcaagttggctgttcctggatttcttagctcagaactctgaacacacattcttcttaggccatggtgtcattctgagggcatgcttaagttattgttgtcaggtgcatctgccatacagggtcattctcagggtatgcttaagttattgctgtcaagcgcactggccatacaggagcattctcagggtatgctgaagttaatgctgtcaggtgcattgaccatacagggtcattctaagggtatggttaagtcgtcattgctgtcaggtgcatctgccatacaatataacgatcaatttttaaaattagattaactgatgacagcatatagctctaccttaatggacgtagacagttgctcaatagagaggtcagtatcccataagtgctttcaaatcttttcatttcatggctcagtgaagggactctggagagagaacaaggttctagctaatgaaaactgattggagggcatactgatgaaaatggtacttagtaattaataatggaaatacaggtattaggcaatggcaatggaaacagaggaaagagagaagagagtcagagccatttcagagggatgggttgttttaggcccatctctttctcactggaacaaacctcaaaccaagtaaaaataccagaaagtgatacaagaaagacgattagtgtgaggtaagtacaaaggaaggaaaaacatcaaacatggacatattaaagataaatggggcaatatgccatgtcctggaggttatttttgaatcacccaacaaacttaactcttccatatctaaactcctaaagcttttctttcttgactctaattttacttaccctgttctggattttcctttagttttttgagtacatgttttatcactcccaagatattattctagaggacaaggacagtagcttgttttactaagttccacaggtactgggcaattactttgtatgaatcacgccatcgatgaatgtttgctgaataaacacacataggacaaaagcatgcataagtgtgtaactacagtagagtatgtgaagcattagctctgatgatcccttctctcaaaaggtttagagtgtacttcagacaattaacgcactaaaaaagactgttctggtgtgaaacccttgatataggacatatccattacaaggaataggtcatagaagcctttgtagagaaaatagtgttgaacattaacagtatttattgaaagcaatgttggtagttatattagtcctgttgtaacgaaattatcacaaacttaatgtcttaaaacatcacaaattatcttattgttctgtaggtcagaagtctgaaatgagttttacaaagccagaattaaggaattggcagagctgcattacttctggaagctccagggaaaaatccatttgcttcccctttccaacttcttcttttttttttttttttttaacttttaagttgaaaggtacacgtgcaggtttgctatataggtaaactcatatcatgggggatttgttgtacagattattttcttgaccatgtattaggcctagtacccattagttatttttccagatcctctccctcttcccaccttctaccctccagtaggccccagtgtttggtgttcccatctatgtttccatgtgttttgatcttttggctcccacttaaaagtgagaacatgcagtatttgattttctgttcctgcattagtttgttaagtataatgacctccaggtccatctgtgttcctgcaaaggacaagatctcattcttttttatggttatatggtattctatggtatatatgtaccatattttctttatccagtctaccattgatgggcatttaggttggttctatttgctactatgaatagtgaggaaatgaacatagatgttccttgtgtccttatgacagaacaatttgtattcctttgggtatacatacaatgatgagatggctaggtcgaatggttatttatgtttttaggtctttgaggaatcgccacattgttttccacaatggttgaactgatttacactcccactcacagtgtataagtgcttttattcttcataaccgtgccagcacctgttattttttgactttttaataatagccattcttatttgtgtgagatgatatttcattgtggttttgatttgcatttctttaatgatcagtaattttgagttttttttcatatattgttagctgcttgtataccttttttgaaaagtgtctgtttatgtcctttgtccactttttaatgggtttgtttgggtttttctttcttgtaagtttgtttaagtttgttatagatgctgcatgttagacctttgtcagattcgtactttgcaaaaattttctctcattctgtagtttgtctgtttactctgttgatagtttcttttgatgtgaagaagctcttcagtgtaattatatcccatttgtcaatttttgcttttgttgaaattgcttttgacatcttcaacatgaaacctttgtccattcctgtgtccagaatggtattacctcaattatcttccagggtttttatggttttgggttttacatttaagcctttaatctatcttgagttaatttttgtatgtggtgtaaggaagggtccagtttcagtcttctgtgtatgggtagccagttatcccagtaccagctgttgaactacttgtctttgtcaccttggttgaaggtcagatagtcataggtgtatggccttatttctgggctctctattttgttccgttggtctacgtgtctgtttttgtaccagcaccatgctgttttggttactgtagccctatagtatagtttgaagtcaggtagcattatgcctgctgccttggtatttttgcttagtcctggccagagaaatcaggcaagagagagaaataaagggcatccaaataggaagaggggaagtgaaactatccctgtttgcagatgacttgatcctatacctagaaaaccctgtagtcgcagccccaaagctccttatgatgataagcaggttcacaaagtctcaggatacaaaatcaacattcaaaaatcactagcatttctgtacaacagtagtcaagctgaaagccaaatcaggaaccctttttcaacttctaaaggctgcttgtgtcctttgcttacggccctttactgcatcttcaaagtgcatcactataacctttgcttcgttcttataaggaccctgtgatttttactgggcccagcagaataatgtagaataattgctccatctcaagatctttgacttaattacatctgcaaagtctcttttgtcatgtcagataacagattcacagattctgggaattaaagactgggatatcttttggggaccattattctttctaccacagtggaaaaccagcatcagcaaagttacggaagttgaaataagcatggagtgtatagccgaataataaaaagatcaaaatgaaatgtaaagtatgtattaagaagtgtggcaaacaggattgctaagcaggctggtataagttacaaagccctttaaaactcaggacaggagatttagatttaatgcagttaatactagcgaacattccaagtttttaaagaagtggctactgttatgaaaatggtatttataggaggttggtcatgtatgatttgtaggagagcctggtggagagaaagtttgatggcagggagaatcgtaaatgtacagtcagatgtggtaccttgcatagttatttacgtatgttggatacaatgcatttctataaattgtttgactcaaaaattatatttttgaattaaagtagcaattattaatttttttacaattcacttattttatattgtatctgtttttggaccatagtgatggttgtcaattcataccttgtcagtcagtggtttttctttgcttcctcattgtctttccctctgtcttaacacctatttgctaatggctattctgaagggattcttctttttctcattcagagaaatcttatgtgttcttgtgaaagtaactttatgttaggaatggtaaattactttttttagatattgttatacattttcttctttaattattaaatttgtgatattagtgaattcttccaagggggaagatactgacatcagactgaatatttactttaagtacatcttaactggagcttttattgctttcacctggaaagggtcaacacttagttgaataaaaaggattcacctttttacttgtaatggaatatcaactgcaatgtggtttttgatggtccaaagaccatggtgtcctcattatatttaacgtcagagtaaagtgccacatttcctctggcaccagaatggaaaggactgcatgcataatagataaaaaaagcatagatataaaaaaagatataaaatatactatttttctgctggtgataggcaccttctccatcctttccctattgcaatacatgaattttgcccttctccaactctaattgatggtcatttagtatcagagtaatgaattctatagttggcctgtaacctgtggctggaacttttgctaggtcttgggagatgagacacccactctctactgaggtggataagctggtaaatcttaagtttgggactgctgagagtcaccattagagagagttttcttaacaatgaagtcagtgcagaggaaagcaaagcccataaaaaagagtctcagtgttggtgagatgatttgagccctggatccaaccatgatttaaactcaaatatttctgtttcttttggtttataagccagtatattttcttcattatttaagctgattttagttgttcatctatcagtttctgtcaagactccactcttgcacagtacacatacaaccagaactcttacttgggctccaaagtctcttcaaggtccctctgtggcatgtttgtcatggtgttgagttttccccttcagctgcctgactttgtatcttggcagaaggagtgagctagatttccttgctacctcctggtaatttgctgagtcatacaactctcttcaaatatgatactgttatagtagcattaatacagggattctaaaggaaaaatatttaattgccataatggggacaaaaacctggttgataaatcttttcatatttttcctatttatggaattagaggaatgaacacaagactgtcttcaatttatctattactataatggattatttctttatttcactagcaataaatgttgggggattcctggggtatttataaggagtaagagatagttttgctaaaagaatctttaaagattttattgaatgtgagatatccagtaaatgataggaatcagtcttgattctcatccataatttctgcttagggagaaactttaaccaagtttttttttaaaagattaaatattacaatatttttttccagtttttttttcttttagtggctctcctttcttatcaccccatataacctaagaggcagagagagtagttctgttgctaactcttgcagaagttgtgcccatttcttttttctggtttgctgagatttttatgccaataataaggtcggcattcttctttggaaaagaaagttgtctaaattctacgtataagtggcactatagaaatatttggaaaataacaatggcatactaaaattacttggaaacaacaaatgaacagagcagtcactatgcagtgtctgcaattcagaacaactctgctttgagactgtgacataagataggcagaaggagggaagattcaaaaattttcttcttggataaataattagatcaccttttaattattatcagactactgtatgattgctgattttgttcctcaatacttatatgtgctatttctttattaatcaattcctggactactcggtttctgtattcgatcctattctacaaaggccacagcctattggattttaaagagcccttaagtaaggttatctaacataacatccagctgtgtgggagagtgcactatataatatgtattcagcaaatattttttgattacatattaattagaagacattgtgctagacatcaaagataaataagatcaaaataccctcctgctgaaactctcaatgtaatgagatagaagaatggagtgaacaggctactaaaatattctataataaaggataacattgatttatatatcagaggttccagaaagctctaacatttgaattagtctttgaacatgaagcttagaaaacaaagagcacgctaggcagaggagacaatatgcaaaaacatggagacatggagagttcatagacaatttggataattattaacagattgacatgagatgaaactagtctattggtgaagaacgtattaagaaaagcttttgtagcaattgcaacaaaagccaaaattgacaaatgggatctaattaaactaaagagcttctgcacaacaaaagaaactatcatcagagtgaacgggcaacctacggaatgggagaaaatttttgcaatctacccatctgacaaaggtctaatatccagaatttacaaggaattaaacaaatttacaagaaaaaaatggacaaccccatgaaaaagtgggcaaaggatatgaacatacacttctcaaaaaaagacatgtacgtggccaagaaacatatgaaaaaagttcaacatcactgatcgtccgagaaatgcaaatcaaaaccacactgagataccatctcataccagtcaaaatggtgattgttaaaaactgaagaaacatttgatgctggtgaggctgtggagaaataggaatgcttttacactgtcattgagaatgtaaattggttcattcattgtggaagacagtatggtgattcctcaaggatctagaaccagaagtaccatttgacccagcaatcccactactgggtatatacccaaaggaatataaatcattctactataaagacacatgcacatgtatgtttattgcagcactatttataatagcaaaatcatggaaccatcccaaatgcccatcaatgatagaccggataaagaaaatgtggtacatatataccacggaatactatgcagccataaaaaggaatgagatcatgtcctttgcagggacatggatgaagctgcaagctatcattctcagcaaactaacacaggatcagaaaaccaaacactgcatttctcaaacataagtgggagttgaactgtgagaccacattgacacagggaggggaacaaaacacaccagggcctcttcgggggtgggaggcgaggggagggaacttcagaggacgggtcaatgggtgcagcaagccaccatggcacatgtatacctatgtaacaaatctgcacgttctgcacatgtgtagctgaatttaaagtaaaattttaaaaaagaaaaaaaagaacagcttttgtgttggtatgtgtgtgtgtgcacatgcaccattctgaagaattgggacttaaattggtcatccagacagcatgcttatatccagagttcacaaagcagcaattacacttttgagtactgctaattgccggctttttgcctatatattttgctgagatctttttctgatttgtattcactggtcctattctcaactccttaaattaaaattagtataaatctcttttatatgactatccctcagatatttaaaagtgtctgttccttatcttctagtcttcagaattaaagttccagtcattcaaactatttatcatgctcttcatagaacattccagcctcagaatgtagatagtctaataataagcaacttgactggtatgtagcaatgttgtgacctttctctggattctgcaagtaggaatatgagtgtcacttatgataatattagtatttttattgctataattgtcagctacattatatttgtatatattgactttaaaacccatagattagttttccaagactcactcctgtgttgattctgcccaatcctgtaatcgtgcagatgattcctatgttacaaggttttacatttattcttgttcaatttaattatagttaattttggtctagcataattgcctgtagagatacttaaatcttcattctctttctctgtgttatcaaccgcttatgttttttaatcctgtgtaacttagataaatatactttcattctaacttttgataaaaatgtagaatttcaaaggatacatgacaacatctacagcagagcactatagaacacacgtcaaggctggtaatatgcagaatttgcaatataaaatacttcagggatttgactaattagtttaattcacctaaaccagctaatattttcctgtctatactcctaattcataatgagtctgttaaatatcttctaaatcaaagtacattacatctttgacattacccagatcaaatagtataataaccttaaagcaaatagaaatcgtgttaatgtgacataccttttcttttaatgcacatttgttgagtcccagaaatatgtccatttcattttccatgtgaatgtgactttatttggaaataagcttttggcagttataatcaaatgaccttaaggtgaggtcattattttaatacaatataactggtatccttgtaagaagagaagaaacacaaagacagatacacagggagaattccttgtgaccatggtggcagagatgggagtcacatgtctgaaagcatagggacagcaaggattgctgacaatactggaagttaagagagctgtatggaacagattcttcctaaagcctttagaaagagcatcaccctgtcaacaccttgatttttggacatctagcatccaaaactgtgagagaataaatgtttgttattttaagactgccagtttgtagaaaattaaaaaccttgacataacgctaatgtcgacatttcatttttaccccttttttgaaattagatcaaaatatactcatcttaattcttctggcagtaatttggttttctgtgtttctctgaagattactgaaggttgattaatcatcacattattaggatattttaatgttcctctaagtttatacaaattccaggtagtcagatgctcacttactccactgtgtactcatttaaaattgtttattagttgctaattatgcacttggaactaagctagacactggaaatatggacatggtccttggacttgagaagcttatcataataagccaatgaaaatatcactgtaatttagagcaacaagtgtaatgaaataggatacctgtagtcctaggagaaagcaagaatagggggaagaaacctgggaagttttccatagcactgaatttaaggttgagtgcaatatgatgtatggctttaggcgaaaccacatacatcaattaattaaaacaaaagaatgaaagaaccttgcatagcatggagatgggagagaagaagaagctttctggaaatctaggtaagtagatttgtttgcagtacagtcagtggcagggaagagagaaggctggaaaagttatccagagctgtttattgagagatcttggatttctttctgaaggtcatacgcagccattataataattcccacccctacaaactttagatgtgtagcaagctctttcaaaggaagggaaacaaacaagtaacaacaacaacaaaaacatacaaaataacttcttgttgatcccctgtatttacttaaattatttttatattaatgttaattggttatgttcaaacctaacaggaatttggaattcttgtacatataattcacatacaactataaaataaaatatatttataaactaaataccaaagaactcccacaaaactaatcaaattcaatttaacagtgttaaattatatgaatgtaaatgtttgctgaaactaagttgcacctgctatggtgtagtttttttatagatatattttttttattatactttaagttctagggtacatgtgcacaatgtatgggtttgttacgtatgtatacatgtgccatgttggtgtgcaacacccattaactcgtcatttacattagttatatctcctaatgctatccctcccccctccccccccctcacaagaggccctggtgtgtgatgttccccttcctgtgtccaagagttctcatttttcatttcccacctatgagtgagaacatgcggtgtttggtatttgtccttgcgatagtttcctgagaatgatggtttccagcttcatccacgtccctacaaaggacatgaactcatccttttttatggctgcatagtattccatggtgtatatgtaccacattttcttaatccactctatcattgttggacatttgggttggttccaagtctttgctgttgtgagtagtgctgcaataaacatacatgtgcatgtgtctttatagcagcatgatttatattcctttgggtatatacccagtaatgggatggctgggtcaaatggtatttctagctctagatccctgaggaatcgccacactgtcttccacaatggttgaactagtttacagtcccaccaacagtgtaaaatgttcctatttctccacatcctctccagcacctgttgctcctgactttttaatgattgccattctaactggcataagatgttatctcactgtggttatgatttgcatttctctgatggccagtgatgatgagcattttttcatgtgtctgttggctgcataaatgtcttcttttgagaagcgtctgttcatatcctttgccccttgttgatggggttgtttgtttttttcttgtaaatttgtttgagtactttgtagattctggatattcgccctttgtcagatgagcagattgcaaaaatgttctcccattctgtaggttgcctgttcactctgatggtagtttcttttgctgtgcagaagctctttagtttaattagatcccatttgtcaattttggcatttgttgccattgcttttggtgttttagacatgaagtccttgcccgtgcctatgtcctgaatggtattgcctaggttttcttctagggtttttatggttttaggtctaacatttaagtcttgaatccatcttgaattaattttcatataaggtgtaaagaagggatccagtttcagctttctacatatggctagccagttttcccagcaccgtttgttaaatagagaatccttttccccatttcttgtttttgtcaggtttgtcaaagatcagatagttgtagatgtgtggtattatttctgaggactctgttctgttccattggtctatatctctgttttggtaccagtaccatgctgttttggttactgtagccttgtagtatggtttgaagtcagatagcgtgatgcctccagctttgttcttttggcttaggattgacttggcaatgtgggctcttttttggttccatatgaactttaaagtagttttttccaattctgtgaagcaagtccttggtagcttgatgggcatggcattgaatctataaattaccttgggcagtagggccattttcatgatattgattcttcctatccatgagcatggaatgttcttccatttgtttgtgtcctcttttattttgttgagcagtggtttgtagttctccttgaagaggtccttcacatcccttgtaagttggattcctaggtattttattctctttgaagcaattgtgaatgggagttcactcatgatttggctctctgtttgtctgttattggtgtgtaagcatgcttgtgatttttgcacattgattttgtatcctgagactttgctgaagttgcttatcagcttaaggagatttggggctgagacgatggggttttccagatatacaatcaagtcatctgcaaacagggacaatttgacttcctctttgcctaactgcattgcttattaggttgaatatgtgagacacacttttccttaattgtaaattatcattcaatgttatgactacttatcatttcacctactcaatcttgccttttctaggtaccggcatagctttatagctaccaaattttagattatgttccctaacctgggtttatgtagttttattcagtattttatcttgaacattatgaaaccgaagactacatactactaactcactttaggaatagagctttcagaatttacttttagtttgttctgcatatctgtcaccagaccagagggttttttgggggttggggtgtgtatttaaggtgggagaggcaattctcatataaattcaataataaatttggaacaaatgtcattccatatgcagattagtttataaataatcatgtgcttactagcactgagctaccatgccatggccactaaaaacctcttaattctgttccattcctcttttttcttttgtgtcctaaatattgatattctagtctttgatataaaatcaacgattcagtgatctgcaccaaaaattcatttggcctgttttattttgaaatttttaacttattcagaggagtctattaagcttgaattttgttcttaaagtgctataatggtccttagcattcatgctgtgtcgttgaacttggatttaatttatttcatcttatattaaatatgttataagatgctgattagatattttggatcttggatgaggatgtactaaaacttagccagtctaagtaaattttaattctagaggattctctacagactgaaaacttaagatggcttttcaactagtctcaactagaaaataattctgttctagcgtgtgctctgttttctcttcctaactggagagtctctattgctcatagtttgtattggtgtctgatacgtatgtctatctcctagacactgtggtgttttcagaatggtagaaaataagattgagattgtgacagcaggctgataaatatctttatgtctcttttatttccctgtgtagtgtttaacacataatatactttggacagtgttttaaaaataaattgtacatttttgtagaaaaccaactatctttataataaacatagatgattacctctctttgagaaccaccagatattttagcttcctaaaggagtgagtccagtagcactttatttttaattaactgacttattaattaattaatttgggggaaacttggtattatttgttgaaatgcatagatagtattctaaagaaagtttggttaatatttatacttaggggaaagcagtacctagggcttgtggaaatttggtgggcagctatgacctgtgctatcttttaaaatagatttttttttgtattagaaaaggttttactagtatcaactaatggcaacataattcattactgtaggttgttgctataaggtaagatcctcattgtctgcatttcagaaaagattctctctgtgttattccatggagcagcagatagcaattctaagacactgaggtacacaccacagatactgtgcattttaattgactaatttgcctcttcaccttttgaattacaaagatgaggagctattgaatgaatgctcaggctttagcaaactaagggagaaatgtcattattaccacagaccaaataaaaggtacaaaaatgctaactgaacatagaaggaccaacttgcagaatgaccttgggaactggcgattttcagtggctcatccgcattctcttccttgcatctgcctgagcacagaatagttcattctctctccaaatctctttcaatttactaaaatttgtctttagttgaatagcagcagcgacgtccacactgtctcaagtcatgcattgaagtcattaaatgacaaatatgcttccttaggaaatgttttgtgactcattagtctaacaggagaagcaccatttctctacttccctctctgtctcctaacctcccccttttcttcctcctgtcctcccttccttctttcattttttttttaattcaagaacttgaaattaaattagagataatccaatttaactatttcatttgaggaaacgaaggcccaaacaggttcattactgccagagccagaagtagctcctagatgttcctgatctagttctttttgcaccacatacactgcttctttataatatgcatactaaaataaaagcataagtgaatattataagccttaacacatatgtgttcagcatttactgtgtgcaaggtgctatgatagatgctgtggagtaaaccaaagagaaagacaatgtttattttctcaagaagtttacattctaacaaaggaaataatttccatatgcatttttatataattatatataaattatataataattgccatatgagttttgtttttaaatcctgggtagaaagaattcaagtctgggattatgtttctttttattattattattattatactttaagttctgggatgcatatgcacaatatgcaggtttattacataggtatacaggtgccatggtgttttgctgtacccaacaacctgtcatctacattaggtgtttctcctaatggtatccctcccctatcaccctcacccgctgacaggcaaggtgtgtgatgctcccctccctgtgtccatgtgttcttattgttcaactcccacttatgagtgagaacatgcggtgtttggttttctgttcctgtgttagtttcctgagagcgatggtttccagcttcatccatgtccctgcaaaggacatgaactcatccttttttatggcagcatagtattccatggtgtatatgtgccacatttcaaaagctagcagaagacaaaaaataactaagatcagagcagaactgaaggagatagagacacaaaaaacccttcaaaaaatcaatgaatccaggatctggttttttgaaaagattaacagactgctagtcagactaataaagaagaaaagagagaagaatcggacacaataaaaaatgataaaagagatatcactactgatcccagagaaatacaaactaccatcagagaatactataaacacctctacgcaaataaactagaaaatccagaagaagtgaataaattcctggacacatacaccctcctaagactaaaccaagaagaagtcaaatccctaaatagaccaataacaagttccgaaattgaggcagtaattagtagttgaccagacagattcacgggcaaattctaccagaggtacaaagtggagctgataccattccttctgaaattcattccaaacggtagaaaaagaaggactccttcctaattcattttatgaggccagcatcatcctgataccaaaacctggcagagacacaacaaaaaaagaaagcttcaggccaatatccctgatgaacattgatgtgaaaatcctcaataaaatactggcaaaccgaatccagcagcacattaaaaagctttatccaccatgatcaagtcggcttcatccttgggatgcaaggctggttcaacatatgtgactcaataaaggtaatccatcacataaacagaaccattgacaaaaaccacatgattatctcaatagatgcagaaaaggccttcaatgaaatacaacaccgcttcatgctaaaaactctcaactaggtattgatggaatgtatgttaaaataataagagctatttatgacaaacccatcgcccatatcatgcagaatgggcaaaagctggaagcattccctttgaaaactggcacaagacaaggatgccctctctcaccactcctattcaacatagtattggaagttctggccagggcagtcaggcaagagaaagaaagaaagggtattcaaataggaagagaggaagtcaaattgtctctgtttgcagatgacatgattgtatatttagaaaaccccatttttatgtaattatatataaattatataataattgccatacgagtttttaaaaaaagtcctgggtagagagaattcaagtctggcattatctttcttcttcttcttattattattatactttaagttctgggatacatatgcacaatatgcaggtttgttacataggtatacacgtgccatggtgttttgctgtacccaacaacccatcatctacattaggtgtttctcctaatggtatccatcccctatcgctcccaacccccgacaggcagggtgtgtgatgccctgtctcaaagatgcccaaaatctccttcagctgataaacaacttcagcaaagtctcaggatacaaaatcaatgtgcaaaaatcacaagcattcctatataccagtaatagacagccaaatcatgagtgaactcccattcacaattgctacaaagagaataaaatacccaggaatacaacttacaaggcttgtgaatgaccatttcaaggagaactacaaaccactgcttaaggaaataagagaggacacaaacaatagaaaaacattccatgctcgtggataggaagaatcaatatcatgaaaatggccatactgcccaaagtaattatagactcaatgctatccccatcaagttaccattgactttcttcacagaattagaaaaaactactctaaatttcatatggaaccaagaaagagcccatatagccaagacaatcctaagcaaaaagaacaaagctggaggcgtgctacctgacatcagactatactacaaggctacagcaaccaaaacagcatggtactggtaccaaaacagatatatagaccaatggaacagaacagaggcctcagaaataacaccacacatctacaaccatctgatctttgacaaacctgacaaaaacaaacaatgggaaaaggattccctatttaataaacagtgttgggtaaactggctagttatatgcagaaaactgaaactggaccccttccttacaccttatataaaaattaactcgaggtggattaaagacttaaatctaagaccgaaaaccaaaaaaccatagaagaaaacctaggcaataccgttcaggaaataggcatgggcaaagacttcatgactaaaacaccaaaagcaatggcaacaaaagccaaaattgacaaatgggttctaattaaactaaagagcttctgcacagcaaaagggattatctttcactctccctttgtgtttagcctcgatacaaatctcttacaagtttatctttgaggactaagcagtgagagggggcagcatagtcagagacagccccagccacctctgtcccaggtcacagatgattcacaaatgccctaaagttggcagatctttcttcctcttagtttacaaagcatagcatttttcaaaagaaatcttctctaggtatctcaatgaaagagagaagtttaaaagcatagaaacaaagagcagtttgcacttcccaggatttttgtcctaatgtatctgaaaatccagccagggatctgttagaacagagtcgtttacagagccacttccatgcctcccttttcttaaattcaatttgcagagaattttctcctcattccagtttctggtcagggaaggaattggaatagagtctcccattaatctagcaaaaacggttcagtatagtattaattgcctaaggaagacagcaattatcactcttctctgggtattcccttagagtgcccacaaaggttttaaatgtttctttgttccttcagtgaggtgctgcttctttcagttttcacaatagaaaaggctggtttttttgtttgttgtttgttttttacagagttaaataaaatccagaagctgttcaggagcaagatgcttctggctgggatgctgagcatggttaaatgatgatgatgatgatgatatcagctaccatttaacctccttgtttgtactagaaacttatctattgatgtgttttttttatatctcattcaattctcataacaattatatgaaagtagtagtattatcttcattttaccaatgagaaacttaggaacttgtttgaggtcagtgagtaatagatactttatttaaatacagatcttctgtgacctcaaagcctatatagtctttccactattaacacagactctggtgaagaaaacagtgttctaaacctattagtggggtgggcagaacaatagatgctatgtgttgcattcttagagcacttaaggtcatctgtgttgacgaaggggactgacgacataattttgcatttttcatttattatgtctttaggtacagatttctctacagtgtttaatgaagaggaaaaccaaaactgcccttaacacttgcttttagaagttttcctcttttcaccattagtttatcagagttttgttattttacagaaaatttggtagaaagaaatggtttgttgaataaaagctaatgttagataatgataagtgttgttaagggaataaaatatagaaaaatgagataaaagtgtttttttaaatgagtaatttccccatatttgattttgagcatttcatttttaatagcatgtttgttcaagaaaaaattgcattaccatattgtaagcttgagtacgtaatatatcaaaggaaatcctaattttaaatgctattcttttatacacatctctgccttcagaattagggatgtatttattatcctaagaacatccctttaacttgctaaccatagctgtaatgactcttagtgatagagccccaacttgtttctgaagcttggtgctttggggaagatgattatttcagaactgaaagttgatgggaacatggctgacaaatgggaagtttataagtaaaaagtcctagcaacaaagagacacctatccacatcaatatgggaaaaaagaatactgatttgttattgagtacacacaacagactacgtgcatgtagacagcacacaaaacctttgaagacagaatgacatttcacacaatttatacagcaaagaataagaaaatgaaataacatttctcttctttcctcagttacatctcaagataggctcctagattagctctaagagtatgtttatatttcaaggggttatgaggtctgcaaccttggagacatctttgcagtgtgaaactagagactgggtttatctagaccctgtggagaccatttatatctaataggttagagcgaggactcaagcacattgtgttttcaaggagactcaggaggataagagaaggaagttgcctccttcctcttcataagcaaataatcttcttctcatcttcctcctcctcctcctccttcttaaaatttatctttataacaggaagagtagagcttttccctttcttatctgtgattcatcccttggactggagtcaagctgaaatgagggttgggatgggtattctttagctatttatgatggcattgcatattcagtggcagcaacagaagatgcactgtcttaatttttgtgagttaattcagccattagaacaataagtgaaaggatagacattggcacctcctttatatggagttgcattatctgacagcttcaagttttgtgaactcagccaagtatgtatagaaagctctgagaagctaaaatatagaccacaaaatctgggtcaccaggcacgtaaaaagaattcattatgctctcacttactctctttatacatagttgaatatgcttggttgtctggtttcccagtccacaacagattagatacaatatggtaaaatacactatggttgggtagagttgcccctaatgacagcaaatgtgatagtggaaaacctgatgtcaatggggctataaaggaaaatgacctataatttgaaagacagaaactctaacaaatattaaaatatacattttagtacatatttaatatgtaaaatgtttgataaatactagacacttagttcatgtcatgtgttttccttttttcccctgcaagcattgctgtattacatcacagcaaaaaaaaaaaaatcaatgttcatactattactcttagttttgagaaatgtttatgtctgggtactctggaaaacagcagagcactgtgtgtatacattattagctctttttaacccaatatgttaaaactgaaacatattttggtattttaaaacataaacttaagtaattcataaaatttaaatatgttgagtaataatagtaaaatagcaattaaaagcactttacacatattagttcatgtaatttcatttatttatgctgaattagatgaaactcctcccattagtgctagattacagtacagtcatgcattacttaacaatggggataattgctgagaagcatttttaggtgatttcatcattgtgcaagtatcatagagtatacttacacaaatctagatggtagagcctactgcacacctaggctatgtataacctattgctctgaagctgcaaacctgtacagaatgatactgtactgagtactctaggcaattgtaacatgatgatatttgtgtatctaaacatatctaaacatagaaaaggtacagtaaaaatatggtattatcttatgggaccaccgttgtgtaagtggtcggtcattgactggaacattgttaggtgatgtatgactgcacttttacctggtatttgtattgtcattattttttgtagaatcttatttcacttttaaaaatgcacttttcttgagaacaggaatctgtctgactagtacttaaatttttgatcatgccttttgcataaaagatgcttagtaaacttttatgaagtcaattaattaaatctattgtacaattccgttggcactatacctttcttgtaatttattttttaacagggtagggaaaatagactgatgaggttcagcagaataaatacataaattaagcatggatggccagctcaatttaagtatgagacaatgtctattatcccctgttggtaataaagtactgttttttcagggaagttcaaatgttcatacaaaaataccaagccttaacacaggattggattcaggtttaaagttatcagttcactgacaatcttggttcacagtttggtgcctgttaattgaattgtagatgtaagattatttataattactgcactcttacccttcattttaatctgaattcattaattttacataatgtcagtagtaggtcaaattattgtaacaatgaactacagtccctaaaaattatgacaaaaagaggccagggttaattttaatttacagttttcagattttataacctatgtatcttatatgtgatcaaggcatccagaattattgaatggcccctgctccaatgtttcaattttaaatcagctatttgtaatcaaaacacaattatctgcttatgtgacatatttcttattatgttctcaggttactttctgaaaacctgttatctaaatacagtggcctggaattgtactcatctaagattttagcctgaagaaagctgggagtggactggcaacatagtgatttttctccttgtcttctagatttaggcctagaacaatatttgataccaacaaaggttgtcaaaggaatttgtctctcacatatttgtaatccatttttatctgccttataagtcataatacttctggtcttgggtctatacgtgccaggcatcatagaggcctagaactctggttctgagtttagatggacctgtgtttaaatcctactgcctctacctcttgatgatgtattcctagccaagtttcctaattccccatagtctcagttttctcatctataaaacagagataacagtagtatctatttcacaggcttgtcaagaagattaaatgatataactcactaaatatatgatgagtattgacattatagtgccctaagtcctttaatgtggtatacagccaaagcttttcaactttacaaattgcttctcattcaagatgatctaatcttttccctgacaaataattcatttctttatataactcatagaatttaaatagacattaaaaggtaaacaatctagctacattaatttttactaagatgtgaatcactggtaaccataactctccaagacttatttatgttttaagagatatctatcttttgaaatctgttaaatattgaaaatttaggcatgatgatgaattgaagtgaaagctttagacaatatatgtgaaaggtacatttggggcacattgcctttcaggttggttgtcattgctgagaggcctatcttgggtttagtttgtggaagtttaatctttatatcatatattttttccttttgtacttttccttcttaaagtcctggatttgttccaggatccctgacagataccaaaatctaaagatgctcaagttcctgatataaaatggtatagtatttgcatataacctttgcatataacatatgcatatcctcgtgtatattttaaattatctatagattacttggaatacgtaatacaatgtaaatgctatgtaaatagttgctatactgtatttttaaggaaataatgacaagaaaaaagtctatctatgttcagtacagatgcagtttattttcaagtggtttaaattcacaattggttgaatccatggatgtggagcccacagatacagagagctgactgtacgttctcgaaaaaactgaatcatttggcaaaggcaaggtgacctacaatagagggaggagttagaataaaggtcaggtcagttgaaggttgagaaagcaagatatgagaagcagcaatgactggttttatatgaagctgtgtgtaagtaggggactgcaactgatgggatgtttatgttcccccaaaatccatatgttgaaattctaatccaaatgtgttggtacttggaggtggagcctttgggaggtaattaggtcatgagggtggagccctcaggaatgagattagagcctgtgtaagaaaaagagagctagctagctagctttctgtcatgcgaggatacagtgaaaagtcagcagtctaaaacctgaaagagggtcttcaccaggaactcgacccttctggcaccctgattttggacctccaacctccaaaactatgagaaataaatgctgtttaagccatacagtttgtggtattttgttatagcagccctagctaagacaaggactaaatttattctcaaggttatagaaatgaggaagttaattcacttaatgctaggtttggacatagaagtagatatgtaatagctcatttaggtaattctgtaggtaggatatagtccattttaagggaacataccagttatttggagattagctttgttttctagaagtgaaaagcactatggggactagtataaactgtacggtttaagtgaaaagaatgtccagatgatgtctgcatttcttataaagacaccaagtagggaagttggcagagctctgccttctacttttggtgctatagagtttagaagaaagagtaatggaaagaaaaaggaactgggtacacatcaccacgggtactcatttcagtacaatgcacaccgtggtgctgtaatacttaccccagggacatagattaaggtgccagtcttgcttctcagacacttaatggaaattttgactgtctgcagagataattttttatattatattcaagaaataataaatgtaataggatatagaggaatgaaactttctagttacagaaatatttaacatagtttcactttatcttcaaaattaatccttaaaaacagatagaactgatggtcttatctctgagttgtagataaggaaaataagattgccaaaactcgtatagcttcagattcagaaaaaaaaaggcagatcttttttattctctgtggttctttctgtcatattacttatgtaaaatgacagtgaaacaaaatgcccaggctttggggcatgtgaagacggaataattttcttctagctaacacgttttttctttttttgagatggagtcttgttctgtcgcccaggctgcagtgcagtggcatgatctcagctcactgcaacctctgctttccgggctcaagcaattttcctgcatcaggctcccaagtagctgggattataggcacccaccacaatgcctggctaatttttgtagttttaactctgtctccaaaaaaaaaatacaaaaaaaaatttagccaggtgtggtggcacatgtctgtagtcccagctacttgggaggctgaggtgggaggatcacctgagcccaggaagttgaggctgcagtaagctgaggtcacaccactgctctccagcctgggtgatggaatgagaccctgtcaccaaaaataaataaataaataaataaataaataaataaataaataaataaaatacaagagacccaaacagataaaacacccttgaactatgaaggactaatactttctgatttcaaaatttattttaaaactacagtaattaagatagtggtcttaattggacagtggtactgctataaatatagacatgtaggccagtgtaataaaattgagtgttcaaaaataaacccttacctttatggtcaattaattgttgacaaggatgccaagataattcagcaaggaaagaatagtcttttttcaacaaatgtttttagtacaagtgtctatctccatgtgaaaaaataagtttgggcagctaccttaaaacatatacaaaaattaactcaaaatgggttgtagacctgggagaaagatcaaggtggctgactagaagtatcccgcagtcacctcctccacaaaaaaaaggaccaaaacagcaagaggataaccacacattgaatagagtatctaagagaacactgaaattcagcaaggaagtgacagggaccctctgaggcatagagtgagagggcagccaagcagctggcctggccaggatcggtttggaatgaggaaggtgtcttcattgtggggaaaaggtaggtgagagatccccagccatccactttcccaccacagatgctggtaatactagccacaagagagccactcagcactcacaggcccttagcctagtacagggagctgcctagggtctgtgcaagtgaattgttgcagagagggaactcacactggctcccactcactccccgagaccaaagcagctgcagcatggagccactttgagaacccaactcccaccagactacattattccctgaggcccaacgggccttgcattttcacatccccaaagtcccacttataacccctgtattcacctagaaagctgcaacaccacaatgacagctaaatctggcattgtggcttggtccccaggattctggcctatgcagtgcactacaccctggggaacaggtgatagagcacaccagggtggctgcccccagtactgatactccccagagccttagagctgcctgttctgggctgctgcaactcagaacaacctcccctccactccaacttcacaactgtgtgcaccttcatagggcctgaggacaggacttccataggcagactgtctccagtgcccacatacaccctccggatacctgcatattggcctgccccactcatagctgccaccactaccacatgctcatccatccggggccctgagggcaggcctgccctgatcgccactgttgatgcttgtgcatgccatccaggagcctgagggttcgtccgccttacgtggtactaccccgctttgcctgtatgcactattttgaagcctgaggatcagcccatccttctcaccaccacatgcccccttgtccactagccagaagactgaggacaggcctaccatgttcattgccactgacatatgcctacctgctgccatctgctgtcatggtcactaccactgcacatgtgcacttcccaggcccccagagacaggccactcaacctgctgctgtactcctcatctaggcattccatccaagatcctagggactggtctgcccagcctacaaacactacttctggtgtcttcactcccacgggcccaaggctgtcctgccactgctattgtcactgccagtgctatgcacactgtccaggggcccaaacacatgccaacctggccctcctcagctaccactaatgtccaagcatgctgcctggggcttgaggatcagcctacctgggtcaccccacagccattactggtgccagtgtatactacccaagggcccaaggactggcatgcctagtttaccagcaacatcactcatgcccaaggaccagcccacctggtgaccttgtccccagcaagtccttgtcacagctgccagcaacaactgcagccagtgtcactgaggaactcactgctcacatttattacagccaaagaaatcatacagagactacactactgcactttcccagaataaaagccaaaacaccctactgaacaaacaataaagatctacttacagggaaaaaaatctttcccgactaaagccagtccataaaattggaacaagtgactattaagacagatgcagaggtatcaacataaggacacaagaatgagaaagcaaggaaacatgacacttacaaaggaacatactttttcagtgacagatcctgcagaaagaaaagtctattaaatgtccgaaaaaattcaaaataatgatcttaaggaaacttagtgagatacaagacaacacagataagcaatataaagaaataagaaaaataatttatggcctgaatgagaaatttgacatagatgtaagaaagaaccaaacagaaattgtagaactgaagaattcaatgaatttttaaaaatacaattgatatcttcaacagtagactagatcaagcagaagaaataattaaacttgaagatagagcttccaaaataacccagccccaataaaaacaaaaaaccaaaaaaattttaaaaagccaaaagaaaataaaaggagtgaagaacatccatgtgacacatgggatgctataaagtaaacagatatatttggattttcagaaggagaagagatgggcaaagctatagaaaacctatttaatgaaataataactgaaaatttcccaagtcttttggaagatatagacatccagatacagaaaggtgaaagattcctaaacatatttcatctaaaaagatcttttctggtgcatgttttagtcaaacaggcaacagtaaaagagaattctacaaacagcaagagaaaagaattcagttacatgtaagggaagccatatcagactaacagcagattttccaacagaagtctgacagcccaagagaaaagagaatgatctattccaagtgctgaaaggaaaatactgccagccaaaactcctatatccagcaaagctatctttcaaacatgagggagaaataaatctgtcaaaacaactccagagaatcaaatagaaggaaattcttcctaactcattatatgagaccaacattacccttatgccaaaagcaggcaaggacacaagaaaaaagaaaagtacaggccaatattcctgatggacaaagatgcaaaactcctcaacaaaatctagcaaaccaaacccgatttcacatcaaaatgatcatttaccgtgatcaaataggaatcccagagattcagtgattgttcaacctacacaactcaataaatgtgatatgttacatcaatagaatgaaggacaaaagccaaatgttcattttactagatgcagaaaaagcatttgataaaattcagcatcccttcatgttaaagactcaacaaattaggcacagaaagagcatacatcaatataataagggtcatatatgacaaacccatggctaacatacatactgaatcgggaaaagctgaaagcctttcctctaagaactgagacaaggcaaagatgtctgctttcaccactcttattcaacatagtactggaagtcctagtcagaaatcaggaaagagaaagaaatataaggtatgaaaattggagaacaggaagtcaaattttccctctttgtaaacaacatgatcttgtatataagaaaacctaaagaccccataaaaaagaatctcttagaagtgatacacaagttcagtaaaattgcatttctacgcaccaataatgaactagctgaaaaagaaatcaagaaaactatgccatttacaatagctacaaaaaatacctaggaataaattaaacaaaaggggtgaaagattgctatgatgaagactataaaacactgattaaagaaattgaagaggactcaaacaaatggaatgacatcccttgctcatgattggaagaattaataatgttaaaatggccatactaccccccaaaattttcagattgaatgcaatctctatcaaaaatattaatgacattctttacagaatttgaaaaaatatcctaaaatttgtatgagatccacaaagaccctaattgcgaaagaaatactgagtaaaagatcaaagctgtaggcatcacaccacctggcgtggtgtgattcaaagtatactacaaagcaagagtaatcaaaatagtatgctattgatataaaaacagacacatagatcaatggaacagaatagagaagtaaatccacatatttacagccaactgactttcaataaagtatccaagaacatacattgggtaaagaatacactcttcaataaatagtgaagggaaaactggatatccatatgcaaaagaatgaaagtagactcctctctctcaccatagacagaaaccaactcaagatggagtaaatgcttaaatgtaaaatgaaaatgataaaaccagtagaagaaagcatagggaaacacttcaggacattagtgtttgcaaatattttatgggtaagactttaaaagcacaggtgacaaaaaagaaatataggtaaatgggattatattaaactaagaagcttctgcacagcaaaggaaagaatcaacagttatgagacaacctgtagaacgggagaaaatatttgcaaactatttatccaacaagggactaatacacagactatacaaggaactcagacaaatcaacagcaaaaaacaaaacaaaacaaaaaaaaacccatttaaaaagtgggcaaagaaactaaacagacatttctcaaagggagacatacaaatggccaagaaatatatgaataaagcattcaacatcactaattgttagggaaatgcaaatcaaaaccacaatgagagatgtcactccagttagaatggctattatcaaaaagacaaaaaataacaaatgctggcaaagatgcagagaaaaggaaactcctatacactgttggtaggatgtaaattagtacagccattatggaaaacatcatggaggtttctcagaaaactataaatagaactgccatacagtttagtaatcccactactgagtatttatccaaagccagcgaagtcaggatattaaaaagttgctgacactcacatgtttattacagcacgatttacaatagctaatatatagaatcaacctaaatgtcaatcaatggatgaatggttaaagaaaatgcagtacatatacacaatgaaataaaaaaagaatgcatccgtgtcatttgcaacaacatgaatgagcctggaggacattatattaaacacaactaatcaggcatagaaagatcaataaccacatgttgtcacacatatgtgggtgccaaaaaaacattttgagcttatggaaatggagagtagaattgtgggtgaggttgggaagagtaggggatagagaaagatgggacgaggttagttaacagatacaaaaattacagctagataggtggaatgggttctggtgttctgcagcaccttacagtgaatatggataactataatttattgtgtcttttcaaaaagctagatgagaggattttgaatgttcacaacacaaagtaataataaatgtttgaggtgattgatacacttgttaccctgatttgatcattacccattgtacacacattgaaataccattctacgttccataaatgtatacaattattaaatatcaactagaaaaagggaaaaaatggattatagacctaaatggagaactcaaatgatattaataaatctcttagaaggaaacatgggaatatggttccatttatatgaaacatcagaatgggcaaatctgtgaagactagattagtagtttgcctatgactgacgcagggagggagagagatgaagactgactgctaatggaatacaaagtttcttcgtggggtgatgaaactattctaaaagggtttgtgatgatgattctgtaattctctgaatcgtctgtaaaatccactgaattgtatactttgaatgggttaattctatggtatgtgaattttatctaaataaaaccattaaaaataaagacaaaggggcctcttcacctctattatgttctccttcctgtgactgttttccctaaattctttccaagataatgctcagtttggatggaatattagttctccttttgctgaaattttcaggtaggtttggtggttttccatcagatatttttcaaaagagtgtcttaaatgggggttaccttttcctttggaacattatgaaacatttatacaaacagagctgtagatatatgataaaagatttaaaattcagttatggagctgggagagggctcaaatcacattttgtagctcgtatttttctacattattcctcgaaatacactcaatcaaatatatttaccaaaataactatgtactagctttcaaatccaacagcttaaaccacaaaacactaattgctacctcctttgaaccttgtaatacttctttttctataatttgcttataattaccatatgcaggcttgtataaagttaaatatatatgtttatatattacatatataatatatgtaaaataataatttgcatattatatatatttagcttaatttataaattgtaagtcaatagacgaaagctttttaaagtttcctaaagacctaacacagttcactacatatatgagctaattaataagtgtttctagttgggtagtagataatgccagtctctacaccagagagaaggggttgaacattaatgtgagtggcttttatcagtaatccagaaaattatagaatggcaccttgtatagtctgtgtattagtcccttgttggataaatagtttgcaaagattaaagatactctatacaatcttacagggctcatcagttagtagctcatttttgtacagaaaatggtagctctgtgaaatagaattggcttagaagactttgacttactggaattctaagtaaaattcaaaacgtaacttttcctctcacacatttttacaaagttaaaaacaaatgctgaaaatacttcatttggtacaagtattccacatgtgcaagatacaatacagcaataagatggaattttcaataaatgactaaacattcaaataagcatctttcataggaggtccttggcaggcagcacacttttcccactaaggctgctgttataaaatcatttttggagctattcttttggaatgtctgtccttctctcaaagccagtgtacaaattatatgaataaacagttttggtacttttccatcataattgtttataacaaaaattataatactccagttagtcaaccacttcattctagggttagctcactttggggtgcttccaaaattatatccactgttaaaacaagaagatatgctaccatttacagttcttaaaaatggattttgagctttgtaatatcactataacaaatgtgtatcttggttcactgccaggtacatgttgagtatccaatcaaatgttggtataatgagtgaatgaattaatatgatttttctgttactttaaagggagtacatctttagcaatatctgtatatgtttctgaaaaatcaattatttcatattcactgattgtgtgcttatgcttgctgtttgaactctttattttctgctcatggcttttgacctatttatattgacatacattctgttgatttttatatagctctaattgcaaaaataaaaattgaacaacatgtaaaaagaaactcgttccagcattttcaccagctttccatgccttctctgttatgattggtagagctctgtgatgtcttcagcctattttcaaatttctgcgtaataaacttcattgggcccacagatctgaatccattaagttactttaagtaatcagtgtccagatccttccttatttggtcatggtgttttgcactcttattgcagtggctgcttttctggtcctttgtagaaacagagattttctggagtcatttatagtattcttgctctccccatttaatacattgggttagatttctaatttaaaaaaaagcatttcttatttcttttagtgtttttcaaaacttgctatttattaattttttggtctgtcctttctttagcctcttatcccatgaataaataagtacatatgttgaaaaagaaggaaatacaatggatttatacacctttcaaaaatttctagggctcagcctctacagactcaaattttaattaatagtttacttttttttgtgccactgaaatttactaaggcatatgtaatgaaatatcaccttttcaggaagcttccactaatggggctcagctgaaatgccttctccttcctttgggtccccagggctttgtggctttgtttattttgcctcatcttggagtaatttgtgtatagttcttagttgttttaaacagtaataataataatagcaatgattagtattgattatttcctttgggtcagatacttgatgtgtaagatcctatttatttcttacaactatcttacagcaaaggtattattatcatcttcattttatcatatgtcattttatcacatgtagaatcataaatatatatgtgagtatatatataagcagaaacaatccttataaaaaccacaattttttatatatatatatatatttttttttttgagttttgcaatatcactataacaaatgtgtatcttggtgtactgccaggcagatgttgagtatccaattaaatattggtggaatgagtgaatggatttatataatttttcagttatatgtataactatggtttttataaggattgtttctgctgataatgagaatttgagcaaattattctgtacaaaataaacctgggttacattttccccttcagaaccttttattttcttatatctaatcctcttgttagggacatttgaaattggcctctttttggtcccttgagacttactttatttctgcttggtgcctatagaatttttaatttaatattgaagtttaataaccttttcccctgatacatggtgtgccatttctaccttactattgaattctctatttcacagaaacgttcctgtattatatctttgaataattttctatttcatttgttcagttctctagtttaggaaaataagaggaaaatatgaaatggttagatgctaagtagatataagacattataagaagcaaagatgaaggaaatgtatcagatgtacagttcagaacaagtagtgtcgaagaggtcagagcgtctgggaaacccaatcaaaatgtttcccctgaagatctccgtattgtgtcagccatcatagactccctacaatagtacaaatagaacactgctccttcttaatcgttttttaagttagtatttaaccctcatttagtgtgtctttaccatgtgctaagtcctgtaaagacaaaagatattaatgctttagtctaaaatctagatttttttccaccaactttggattttaaaaagttttaagcttccagaaaagttggaaactagcaagatgttaaaacaaatctagattcactgattactctttaaaattaaattccactgtcttctaaaatttcagcatgtatctccaaagaagatgattcatctacatagtcacagtaccccccaaaattaactttgaaagtatattaccaaagatgtagtttatattcacattttcccaattttctcaacaattttatttatagattgtctctcctaggatccaattgagtattacacattgcatttagttttcatgtttctttaacatcctttattctaaagtgtcctgatgttaacattttttagagttctacaatctgaatttttctgattgtttcctcatgattagattaggttaaatgtttttggcaagagctgtatcacattaagtggtacaaaatagtagtttatcctattctttgtaatgttatcttaaattacttagttaaggtgttggctgtaaatcttttcgttgaaaggaaaactttcctttggtaattaacaagttatctgtagggtgacactttagaccatatgagcataccgttttccaacaacttttcattgaatggatttagaaatcattaatgatccttgccagaatcaattgtattcgtgttggcaaaatggtgattttctaattctactcctaatcttcttaagcacaactatgacctcattaaggtagctgtcccaaattttctgggcctcttttttttttaaaactatctggtagatacagtgagatctcttttacaaaaaagaaataagtacagtgttaaatgtctaatgagcatcaggaacacaaaaaaattgtacctacattgacctgctctttaacttcttccaatatggaagagatagtcagtgagcacctgagtgatctttcaggaaagcaaagacaatccacgtaacatgtttgtctctagcactcatccttggatatgtctcctttccttcatgtaaacagttaagaaacacccaattgtaaatataaaactcattctgaaagaagagggggagcaatactgtaaggacttcaaatttcctactctattattggaaaatggagcattttttttttttaatcggccgcagggatttttgttagtgtttttgttttattttaattaagaagaaaacattaattctatgaaacataagccatttgctttccatatatttggcctggagtagactctggacattgataatttttcaaaacatctccaggtgattctaatgtacagccaggattgagaaatttttgaagaacaggtaactccatcttgaaagatgggtggaattaggacatgtggagattgccggaggtaactttaggtgaaggaaataacataagcaaagattaacctactgatggcaaggatttgccattcttttccacaaatgaagccttttttttctgttatgtttacctgaaaggtaattggaaaaatgatgccttaaagttcactaatttgtgagaatcataggcaaaagctttcctgtgatattagagaagagtaagatattgttcttgataacatcctgcaactcatcatttatagcataataagcccttccactctgattctgttagacaggcccatccatggcaagatattaaacaaaacaggatttattgaaaacatgtctgataatagcaatgatattgaaaaagagcaaaacagtacaatcctggtttttatgtttctgctttgaccacaggcttaaaatgtgtatttcaagcctataaatattgattgtgagacacaagaaacataatataaatattttgaaggaatagtaattaagagcagtgagtcacaggtagctaccagatgaaaataataaacccaactttgtcagggcttcagatcagagtaaggtttcaattttgatatccacggagaagagccaaattgaagatgaatatgagtaaatattgatgatccatactactgaatttgtctggtgataaatgtttcttaggtattgcacatattccgaactcataaatacatatactacataaaaacatggaaaaaacccttcagaaatgttttcctgtattatattttcagaaagtcacaagttttagagaaatcatataagcagaatggcagacagcatgggccatatttccatgtcaaaagtaaattgaaaatctaaattagtacctgaggttaaaaatacttatgtccacagattccagaatacaaaggaaaagtaatgccagccaaatctgaaacataaacaactataagttttctttgtatttgaaaatatggccttggaactctgtataagaagatgcttacttcataaacatacatgtgcaagtgtctttttcatataatgacttctttaagagtgccctccaatgatatgacaagatgctgaccgatgttatacctcatttcctgaaagtttctaagtgctctatgatggatcctatggtggtgagagtcaacaacctttgtcataataaataggagatttttctcacaattttcgaagtaatgtgacattaaaaataaggataggaaggagacaaggaaagaagaatcagtaaagtagtaagaataattagtattgtgtcaggagaactaaattctagttgtgtctctgtcaccaactagctagaaactttgggtaaaccatcttacctattgacttcacttgcaaaatgaacattaggctgtatttcaataatttccaagtgtttgaagaagtagaacctttatcaataaagtatagtatagaaaactttctttcctccacttttaaattattcctgaagttctgaccctttttcctattctttactttcaaatgcttttaatttcaacttctcccacttgctgttacaccctaatatatctaatacgtctctacaggtatatttctgtgcctttcagtagccctctatgttcatctactttttaattttttttatttcaataggattttgggaaacaggtggtagttggtgacatgcatagattttggtgcacccatcacccaagcagtgaacactgtacccagtgtgtagtcttctatttctcaccaacccccatcctttcccctgagtccccaaagtccaatgtatcattttgttttattactttttttcttaaaaatattcagatattgtatcttattactcctttaagctactcatccattctacatgttttccttataaacttttcaaaatggtagcaattgttttcacaagcagagccttatgggaattttacatgtgtggaagaacataataaatttggaatttgctgatgatttcacttttaaaaataaataaatagaacctttttctcccttgaatgaactcttacttggaatcataatatgtaaaacagatgaaggcaaagatgcaggagaagttcttgagtcctaccctttcagccattcccatccttatgagactgacatggcactgccacagacacccaagggccttgctactcaaagtgtggtccaggaatcagctgcatcagctggttagggatacagaatctcagaagcttatttgagaatcacaagctccagtgggacctactaaatcaaaatctacattctaacaggccccttccacccaccacccaccttcattcctccctaccccctttttcctcaccactatgatctggttcacactaaagtttgagaagctccgctctaaatacagatgcaactccatttgaaaagtaactactggactagttaactcatagagatgaatgatgttcattttgtcctttcacacaccacactgactgattctcagctggaagcccagtgtgcaagaagaacaagaaatagtggcactaatgccatttttagtcttatagaaatataggaatatagaatgcagggttttattttatttagtagacagtccagtggtctgtttattctacaacactgactcaaagaaagggactacatagtggcctttatgtatattagcatatcagtcagggccccagcaggaacttaatgccacactcagtgggagacttcttaacaaagttgtgggcaatcttaaggaaaccactaagggatggtgaagccctagggactagcaatggtgggaaccactaacactgtcaatcttgatggagcaagggaagggatggaacctagggaaagctttaacagtgggaagggcccactgtgggatctcttgccttaggtgggagaataagccactgccaaatcacagatcagcagagagcaaaccaagagaatgaataaaccagactttctctcctctcccactctggtcacctgccatcgtttaccattggccaaacccaactggaaactagagtgcaggggaatgatttgatgcagtacagaaaagtcatcttcctggggtacagagcagggtacagaaggtggaaggtggttctgaagaggaaattcagaatatctaacatgataaatagttggatttgtaaataggaaaaaaaaggtagtaaagtaaaattctaatggaaaggtttcatttgtgcttgttttgtttgcatatatgttcatacacttatgtgtgtatgtatattaagcacaagggggaatttctaagacatagtgagatgtagcagaaaatgtgtactttgaagagactttatactttcttctgctgtagaaagttttagataagagaacgttgttaatctgtatttatctagcacatacccttttgtaggcactgctaaggacactcaagtataaaacatggtccctccctcagagaactatgatcttggttgaagggcaaaaacatcaaatatgtttataatatgcacatggaatggaatgctttatttcgttcattcagccaatatttattaagcacctgctatataccaggcaatgtctttaagtcgagtcagaaattcaaaacaaattccctgtggacagggaatttgtaatcttgtttgaaaggtggactttaattatacatttcaagcatgataagtgttttgaaaagagaaatacggagttgtttaggaatttgtatcaaatacacctaacatattggggagccaaaaaagcctcctcgaagcatttaagaagtataagtaggaagttattcaggtcatagaggatagtaaggtgaagggcagctgggggcagtagagatgagggtgtttgcaggggcgtactagtagaagggcagagaagatcatgtgttcaaaaggcccagggagaaaagagatcatggcatatttaacaaagtgaaagtaatctattataactggagcagaaagtaaagggagtgtggtattgtcctttatcctacagcactagaaaggtattaaaatattctaagtaaatgaatcactccatcaaatggaaaaattatgaatataaaatttggacttctattattaccattttgaactaaaactttatgttgatgtgtttatttctaaagtttttctgagaaataagcacaagaatgaatttttctcaaaattttttccgaagtttattttttacttctaatttaagaaaatagctgaattgttcggaattttctgtcatgttttgctgtatattaaagtaataacatcttttaaaaggaaattggcaagtgttctttattagcaattttataaagatagaaccattttaaattgattgttgccaaaagtagaatacaaaaagtatcacagaattatgtgaataattaggaaataaattttacacctctttatgtgtatgtatgtgtgtattcttactgctggaatttcttaatctctgtcagcaatagcacttactttcaaacttcttcatctactgcctcagcttactgatacttctatatcaatatagttattttgcctttctggagaaggtaaatcacaaccaatatgtatttctttgaattctagccaagcaaaaaggacatgcagagtccctcttgagctagaagcgtttatgcagatggtatcatttcatacaaacatgtattgtcaaaacccatcataagatcactgtcagaattactggggatcctgtcaatcatatgtttctccatgttattatttttccaagtatcttctttcaccactacagtagccctgatggatattaacacagaaaaaaggaatagtgccatcaatagtgcttcttttcttccaataacaatatcatcatttttggcacagatgagagataccttatttcttaggtgaatgtatagatggagggacacaactgaaagaatgacttcttaatcagcttacaatgtcatattttcaaactttatggattcagtggctcatgttaaattattttacagtagacatttatatatatatgtatataatactttaagtcttagggtacatgtgcacaacgtgcaggtttgttacatatgtatacatgtgccatgttggtgtgctgcacccattaactcgtcatttacactaggtatatctcctaatgctatccctcccccctccccccaccccacaacaggccccggtgtgtgatgttccccttcctgtgtccaaatgtcctcattgttcaattcccacctgtgagtgagaacatgtggtgtttggttttttgtccttgcaatagtttgctgagaatgatggtttctagctttatccatgtccctacaaaggacatgaactcatccttttttatggctgcatagtattccatggtgtatatgtgccacattttcttaatccagtctatcattgttggacatttgggttggttccaagtctttgctattgtgagtagtgccgcaataaacatacgtgtgcatgtgtctttatagtagcgtgatttatattcctttgggtatatacccagtaatgggatggctgggtcaaatggtatttctagttctagatcccggaggaattgccacactgtcttccacaacggttgaactggtttacggtcccaccaacagtgtaaaagtgttcctatttctccacgtcccctccagcacctgttgttccctgactttttaatgatcgccattctgactggtgtgagatgatatctcagaaataataccacacatctacaactatctgatctttgacaaacctgacaaaaacaagaaatggggaaaggattccctatttaacaaatggtgctgggaaaactggctagccatatgtagaaagctgaaactggatcccttccttacaccttatacaaaaattaattcaagatggattcaagacttaaatgttagacctaaaaccataaaaaccctagaagaaaactaggcaataccattcaggacataggtatgggcaaggacttcatgtctaaaacaccaaaagctatggcaacaaaagccaaaattgacaaatgggatctaattaaactaaagagcttctgcacagcaaaagaaactaccatcagagtgaacaggcaacctacagaatgggagaaaatttttgcaatctactcatctgacaaagggctaatatccagaatctacaaagtactcaaacaaatttacaagaaaaaaacaaccccatcaaaaagtaggcgaaggatatgaacagacacttctcaaaaaaaagacatttatgcagccaacagacatgaaaaaatgctcatcgtcactggccatcagagaaatgcaaatcaaaaccacaatgagatatgatctcacagcagttagaatgacatttttcaaatcacgaagaaacccagaaaatttgtatatagtaggctctgatcttgccaaatgtgggattattctgatacatagtttatgataaattacaccaattgctcatggtctgcggctgcttataaagatgaaaatttgtttgtccattagttattagttaacagtagatatgaataaatttatgaatatatgtatataaatttgcaaatatttgatccctctgaaattacaactgaattctacttgtttccaaaatgttttcaactttatacattttcatttattcattcatacattgattgactctacaaatattcactgaaacactactgtgtgttaggtcccatgctagacctatttttaaagttgacttttaaacagatcctgctttgaaaaagctttcagtttagaaagggggtaaggcacggagacatactacaagagacaatgtgctaagcaccaaaagaaagtcttgtgcaaagccattctacatctgagacaagtgaggttatttctacttgagagggtagggttgcacacgagggacaattttataatggaggtgacattgggaaagcatctcccagaatggataggacagagacatagcaggattggagaaaagcacatttttccagcctgtgaggaaagtattagcatagagtgtgtgctcagaatagagaagatgcaaagcatggagtaagacaggatcttgaaaaggcttggaatggtgaccagactgcatgttctgcaaatggaaaaataaccaaaaactattattaaacataaatagcaaggggattcttctcaggaagaaactaatagtatggtggggattcatttgtttgcaggaagggaacagttgcaatacagtggtgactataaatttttatgtactaatttttcagtatacagtagaccattgagcaacacagatttgaactgtgtgggttcacttatatagattcttttttcaataaatacattggaaaatgttttggagatttgcgacaatttgaaaaaacttgcagatgaaccttgtggcctaggtatattgaaataatttaaaagttagttatgtggaaagcagtgtggtgattcttcagagagctagaaacagaactaccacttgacccagcaatccgattactgggtatatacccaaaggaatataaatcattctaccataatgatacaggcacacaaatgttcactgcagcactcttcacaacagcaaagacatggaatcaacctaaatgctcagcaatgacagattggataaagaaatgtggtacatatacaccatggaatactatgcagccataaagaactacatcacatcctttgcaagggacatggatggtgctagaggtcattatccttagcagactaatacaagaaaagaaaagcaaatattgcatgttgttacttgtaagtgcaagctaaataatgagaactcatggacacaaagagggaaacaatagacactggggcctccttgagtgtgcaggttgggaggtgggagaggatcagaaaaaaataactattgggtagtttgcttagtacctgggtgacgaaataacctgtacaacaaacccctgttacaaaagtttacctgtataacaaacctacacatgtacccctgaaccaaaaataaaagtttaaaaaaatgtagatactagtctgtttcatcatttactactataaaatatatacaaatatattgcaaaaagttgaaatttataaaaaaacttatgcacaaaaacactgactctacccggcactaccacttgcagttgagagaaatgtaaacaaatgtaaagatgtagtattacatcataactgcataagattatagtacatactgtactattgcaataatttcataaccacctcttgttgctgttgaagtcctattgtatcctcttaaaatggcatgtgatgctaatcagatctgcatgagcagttcatctctccagtaaattgcgtattacagtaaaaagttacctctcttggtttttgtgtattttttacagtgtttagtgcaataatgtaattcttgaataacaccatggggcccacatgaagtcccactggtgatgctgaatgtgcttccttgaggcagagaaaagtcatgacattacaagaaaaagttgaaatactttatacgtactgtatattgcggcctgcagctgcagttgcctgtcatttcagacagacgattcatcttgtaaacagacaatgtaaacttatggtattgataaatatggtacagtactgtatatgtattttctcttttgattttcttaataacattttatttttctctagcttactttattgtaagaacataatacataatataaaatacaaaatatgtgttaatcaactgtttatgatattggtacagcttctggtcagcagtaggctattagtagttaggtttcaggggagtcaaaagttatacatggaatttcaactgcatgggggaccagcgctcccaatccccatgttgttccagggccaactgcacttttttcattcttaataatttactctttttaatctctatatggtttataaaacttttcatttacataattgtttcttaaactcactcaatacaaagaatcatttgggatgcttgtaaaagatagcatactacagttattatagttattccattatcttccacagaaaatttttgcttagatttacctacattcgtcccattctttgtttcctatttttttaatcttaggttattctgggttcatttttctttgtttcagtaatgcacttttagaattttcttttgtgttattcatggagaagtctcttggtttgtgttgatctcattagcattataaaaatatagcttttctgagtgtaccacactaggatgacagttattatttctcaatccattgaaaatattattccattgtgttctggtttctattacttctatatagtgtcagtcttctctctctgcttttatgatctctgtgctatctgtggattcatgactaagcgtctaattctggattttgttttatttatatttcttggtggatgctgtgcttgatatcgtgagttcatatttttcattacttcagggagtttcacaatctggtacttcaaaatttacctttccccattctctttattctccccattctctttattctctccctcaggtactctgattaatttagattttcacattctatatcatatattacttgatctcctcatattttctactctttagctctttgttctacatgttacggtatttttagatcttccagttctagtttatttactttctttagtggcatctaatattttatttaacccatctgctgttttgttttactttcaaccattttttaaaaatttataaaggttctattttcttttccaaatatccctcatcagtttttaattggctctcattgtattttgtgatgtcattctttacttctttaaatgtcctatgtatattttatattccaagtcgtaaaatctagtatttgatgcccttggtgagctaaatctattatgttttttcctacctactctcatttctggtggtaagttttattgtaaatttggtgattgttgattgttaccttatatttgactttattttattctgaggaaaactaggatgcctaatttaaagatatattccatgtaagagaaggttcatgtgtttccacagggattttggagacattacaaacctagaacaaatttagccccttccagggtttcaggtataatccaagaatctcattttcagcttatcttccttgctgctaaggtaaagctaaatctccaaaccacagtgcagagactggcatttaccctcaagctatcctatcttaagtatgcgctttcagctcatagttaagcttttagctcaacgtttatgcttttatttttgcttaggccccttggagattttcctcacctattttaagcccagcagtgttatgaaaattatattttatgcaaaatctactttttttgtttgtttttcatgaggatccttccagcctactgccagaagctgaatgatagatattttttgcctatagcacaatgacagtctggaaattatcaagttgttttgatcaatataggtaagccaaactggaatactttagaataaacaaacaaaaatgaacttggcatctgatttgtccagtttagtagtctctactgattcttgctactttgtgctatttggatgcaacgtaaaatattgtattagtaaaatatttaaaatgagcccagatgatattatgctaagtgaaataaaccaggcacagaaagacaattactgcatgatctcatttatatgtggaaactgcaaaaaggctaatacatagaagcaaatagtagaatagcagttacaaggggttggggtatgggagaaatgggcaggtgttggtcaaagggtgcacatttgcaagtataagatgaataagttctagggacctaatgtacagcatgatggctatagttaatgtactatatatttgaaataggctaagaaagtagatcttaaatattctcgccacaaaaaataaatatgtgaaatatggatatgttaattagcttgattatggtaatcaattcacagtatatacatgtatcaaaacatgatgttgtacacattgaatatataaaatttttaatttatcaattgtaccttaataaggctgaaaaaataatttctcttttacagagtggtgactgggccactcggagactactgcatagctcttctcaaagcttctttttctttattctaatatgctttgtaatggaaaattgaagggaaagtagagaattgactcattaaaaagtctaagacattaaaagatattttgtctatttttccaatagttaataatctttacttacggttgattaagttcatataagttaaccattccattaatatctatagagtgcctacatggcgtgtactgttccacatggtagaaaacatagcaaggaacatgtagatagaaatcgctactcttatggatctagcatcctatcatcatgatagacataaatgagaaaaggtagtaaaataaatagtacggtagatagtaagtgctaaggagaaaaataaaacttggaaaaggaatcaagaatggtgaaagttgttgtaatattagatgggtatatggattcactgcttctgagcattttcttaatgcattctgtggactgttagatcacaggcggaccactcccataatctagtgaacagattatttaggagagtgagtgttatgggttaactgtgtacctcttcctaagatactttgaagtcctaacccccagtatctctgaatgtaaccttatttggagataagtttctttacagataagtttctctattatttctttacagaaataatcaagttacaatgaggccagtagggtgggccctaatccagtatgacctctgtccttacaaaaagggaaatatttggacacagacacaaacacagggagaatgccatgtgtaaattagagttatgctgctgcaagccaaggaactaccagaacctaggagagagaatggagatctgtcaacaccatgatctcagactcatagcctccaatacatatggcagtaaatttctgttgtgtaagccactcaattcgtgatacttccttacagcagccctagcaaactaatatagacagcttaatagtatgtaggacaatagtaggtgctgagctaagggctctaaaattacttctagcccactgtatagctgctttcatttaatttaacaaatatataatgtttatgataaattagggactactgtagaaaatttgtaaatattaaccaatgtgcatccaaataacaattgtgttatataggttcatttattattttaaagatgtcaggaaaacattcaagcaaacattgcatggcagggcagacattcttagaccttatataggggattttcctgagggtgtcatataacacatgcacacttatgcaagtttttaaaaagctcattctctagtgatagtgaaagacgtaggcaaaggacatgctccagacaagaatacctgtatcctagtcctgcacctctgtttcctgagccgtagaccctggacacatcatttctttcagcctccatcttacacctcctaatactaactaggttactataaaattaagtcagatgataattttaaatgttaaaataaacatcaaaaagaaataaagtctctaatacatagtttgccctagagattttcatttttagagggattattccctcaatattttctcaaataatgtattaatttatacactgcttgtgaacactgagatttaagaaaccatttaaattatttagagaatacttgaaaggctttaaaaccatctgactggaatgcaaactacacatacaattactttcaaagagataaaaattgatatgaaattataattcataatgattaatgttgaacgagcataaaaccaactgcatatttgtcctttaagcaaagctttggattcagaattatagattaaaatatgtgttaatcttgggacttgcctttaattaatttatggcatagaacctaaaaatgggaagtatattaattaaaatgagagtgaatatagtcagactgggttgggaaagaatcttgatggattcttttcaccacattcttagtatggaggaggtgcgagtctagatcacatctcaagtgtatgatggagttgggggaaaatgatttcttaccaagacctggtatattagtcaaggtaagtattgctagctgctataacaaacaatcgtgaaatcccagtcccttaaaacaggaaacatttatttcttgctcacatcataggtctgaggcaggttgggtgcctctactgagcagccctgctgcgagagagactgtggaatccagtctcctatcttgtgattttaccatcttagacaagtggcctccatggctactgaggaaagagtagagagagaagtggagaatcacataggctaaactcacattccaatggtcataactcagtcagtatagctgtaacctgacaagaccctgaccaataacgttttgctttctgctatcatcatatgggcctttcttcagtgctctaagtatgcaatttttcttttccttctgggcctttgaactttcctttacccgtcttggggcacttccttgccatatcccaataacccacgtgcttttcaccagcacagcaagcttccaaggaatgtttcttcagttgaactctatcatcttgtcaaggagttttttacacgttgttcatgttcacgggaatgtctagaaagacaaattctgattatctgtgtctgagacattttgctagtgcaaagtcaaccttcatcatgatattatgatttatgtggcactttttatgctttataaaactgtttttaattgataaaactaagcagaaatgtatttatagacagttgtttccagagtttcactgttactgaaaatgctgtactgaataagggtgtatttttaatctgcattccatgcttatagctatataagctttatgaagcttatatagcttcataaaatgtattataaattcttcaacataatttcatagttaatagtttcataattaatagtacctgttggtagtatctttcatatgccagctgaataatcattatcattgtcataatgcttaataacaacaataataattgatagtagttgttgtgtacatgtatatgtgggtactggcctatgcttttgatatgtattatttcatttaaacttcattgtactagtcagggctctctagagggtcggaactaataggataaatgtataaaggagagtttattaagaagtattaactcacacaatcataaggtgaggttccacattaggacatctgcaagctgaggagcaaggaagccagtctgagtcccaaagctgaagaacttggagtctgttgttcgagagcaggaagcatccagcacaggaaaaagatgtagccttggaggctaagccagtttaatatttcaactttcttctgcctgcttttattctggcagcgctggcagctgattagatggtgcccacccggattgagggtaggtctgcctttcccagtccactgactcaaatgttaatctcctttggcaacaccctcacagacacacccaggaacaatactttgcatccttcaatccaatcaagttgacattcagtaataaccatcacaagtccaccccttgtcaacttgaacccatacacatctcctgaaatcatacataatcttcaaataaagacaataagttcataattacacataacataatacaactatcctttgtacaaccagaaatgcaccaatccccaacccaagtgctatcacataaagtaataacacttaaatgctgacatgaaatcaataaatcttatgtcacatgataaaggagaaatgaatgaaatgaagatattttcttagtacaagtgtatacatgcacaaacatgttcttaacaaaataaagaggaaatactcatgacaattacactcctcatttctgcaactggtcatatggtcgtagctggtattgatgactaccttcttctactacccattctgtattccctttgccttcagcaagcacctcagcaggccatggttttttacttggtgtagtgacccaaaccttcagtcctgaaggatctgggctatttgtagtcctgcctggattgtgttcttctagtttcccattgaccttaatcacgtcacagggcatggtaatactaaaagacactctaagggatctcctgtattccacacatattcttccttacctccattttgaagtagtggactgatttcatcttgatagtccaggtcagtcaccccaaccaaacactgtaactcccttcttagcctccctaacttaccttctaaaggtaggaggagctcaaaatatccaggtggcaatcttaacttccagcttaatagaattgttgcattcttcaatactttgcatccttcaatctaatcaagttgacattcaatattaaccatcatattcatcctgatcctgttctgttaaaattatcattatcccagtcttacaaatgaggatgctaagaccctgagagaccatgtgatcagcctgtcgtcactcagccagcaagtagtggaactaggctttaaagtcaggccatttttagtttcaaaagtctcactcttttcatctttccacaccatgtatggaaagaatactgagtgagacaggccccaatcagggctctcttaatttataaactgtgtgatctctggcaactcacccaaccctcccttatcttagcttccgtgattacagtaattgtgattgtgtgttccacaccactgcaggacgataaaatgcaacaaggtatgtggaaactttgaaaattccaacatgctgtacaaatccaagggataatcagaagattattattgagtcacagattgactttgttcgtcgagcagactcttggcaaatattaaggatatgcccagagcactcaaatctccaaattggaaacaaagcaatcatataattcctcttataaaatatagcagtgcgactgaaaatgtaagggcccctttacatctctaatgttttcacgaatgttggaggaaaatcattaataaagttgttaaaacaaatactttctggagtatttgttgaaatagctctgtgattcatctttgattaatgtatttacaggctacttgatggacttgttcatgtgctagctctgggattccactgaactccacattctagtcttcattcttttgaaaacatattctggcacagagccgtctatggtgggctgtgtaggtcaagaggtcagggttcaatccttgccttcttgcgagtttgccttgtgatgtcatgcaagttgtcttcctctccatgccttcttttcatttataccattgagtggatggattggacaagatgatacttgatacaataattccccagtgtagttgatattttgaatcatgtgtaggtgttgttaaaataaaaaaattctgaaataaggccacatacctgcaatcaactgatatttgacaaagttgacaaaaataaacaatagggaaaggacaccctatttaataaagggtactgggaaaattggctagccatacacataagaatacaactgaactcctatctctcatcataatcaaaaatcaactcaagatggatcacagacctaaacataatacttgcaactataaaaatccttaaaaaaaaaatctaggaaaagcttttctgaacatgggcctagtcaaataatttatgatgaagaccccaaaagcaaatgcaacaaaaccaaaaatagacaaatgtgactttatcaaactaaaaagcttctgcacagcaaaagaaaaaaatcaacaaacagacaacagaacgggagaaaatatttgcgaattatgcctccaacaaagaactaatagccagaatgtacaaggtactcaaacaactcaacaagaaaaaaaaataaagagctacattaaaagtgggcaaagggcccgagcacccgtaggtcggattctctggataaggcaccggaagtgaccgcctcgcggctgcttcctctcctggagtccagagtctcgctgttccgccgcgatattcagtaaaccactgggagtccggcagcatgaaggcagcgcgccctcccatgactgcagggaagttcatggtggtcggcggcggcatcgcgggcgtcacttgtgcggagcagttggctactcactttccatcagaagatattctcttggtaacagcttctcctgttatgaaagcagttacaaatttcaagcagatttctaaaatattggaagaatttgatgttgaagaacaatcaagtaccatgttagaaaaacgctttcccaacatcaaggttatagaatctggcgtaaagcaactgaagagtgaagaacactgcattgtaacagaagatggcaatcagcatgtatataagaaactctgtgtgctggagctaaaccaaagttgatatgtgaaggaaatccttatgtattaggaatccgtgatacagacagtgctcaggaatttcagaaacagcttactaaagctaaaagaataatgatcttagggaacggtggtatcgcacttgagttagtgtatgaaattgaaggctgtgaagtgatttgggccattaaagataaagctatagggaatactttcttcgatgcaggagcagctgaattcttgacttcaaagctcattgctgaaaaatcagaggctaaaattgcatataaaagaaccagatatacaactgaaggaaggaaaaaggaagctagaagcaaatctaaatcagataatgtaggcagtgcgttgggaccagattggcatgaaggcttgaatcttaaaggaacaaaagagttttctcataagattcaccttgaagctatgtgtgaagtaaagaaaatctaccttcaggatgagtttagaattttgaagaaaaagtccttcacttttccaagagaccatacgtcagttacaactaatacagagatgtggcctgtctatgtggaattgaccaatgaaaagatatatggctgcgatttcattgtcagtgctacaggagttacaccgaatatagaaccttttctccatggtaacagttttgatctaggagaagatggtggcctgaaagtggatgatcatatgcacacatcccttcctgatatctatgctgccggtgacatctgtactacatcctggcagctgagcccagtctggcagcagatgaggctgtggacccaggctagacagatgggatggtatgcagcaaagtgcatggctgcagcgagttcaggagactctattgacatggatttcagctttgaactgtttgctcatgtgacaaaattttttaactataaggttgtactgctgggaaaatacaatgcacagggcttaggttcagatcatgaattaatgctgagatgtaccaaaggacaagaatacatcaaagtcgtcatgcaaaatggacgaatgatgggagctttcttaattggtgaaactgatttagaagaaacatttgaaaacctaatcttaaaccaaatgaatctttcatcatatggagaagatctgctagatccaaatattgatatagaagattattttgactaaaaatggaatttcttcaagaatcatataaagttccaaatgacaccagaaaaatcacaagtcaataaaatgaatgactgtattgagttaatgatgaccacactgaaaattacagaagtgataatgatattagtggaaaaatataaaaacataaattctaagtttgaaatcagttcaaagtttatttatagatatatctttccaatacaacactgaccacttggataaaaatcttaagttatttatttctgtgttttaaacataaatatgtttacttgtgatttagctttggagcaaatttaggtaagttatctatttagccaaatgtactctagtagattagaaccattctttgtgaaatgtcaaaatatggctgtggtttcaggaactttaaaatcggttgtattttactttaaatagagatgtagcaatatctcgtttgctaatatttatattgatgacttactccttttttgttgaattgtacttctggttttataacctgaaatcatctacaagcttgtccaactctagcccacgggtcgaatgcagcccaggacagctttgaatgcagcccaacacaaatttgtaaactttcttaaaacttgagatttttcttgcaatttttttttaagcttatcagctatcgtcagtgttagcatgttttatgtgcggcccaagacaattcttcttccagtgtggctcagggaagccaaaagattggacatccctgatctacatatttaacttaaagtatcactcagtgagcctctgtcagtgtaatattgctttcaaaaagatagttatgtcaaaagaaaaaatatagctaagtatataaaggcataaaaaacttaagacaattatatggacttattctcaaatattttacattttttgtaaactttcttaaaacatgagatttttcttgcaattttttttttaagctcatcagctgtcatcagtgttagcatattttatgtgaggcccaagacaattcttcttccaatgtggctcagggaagccaaaagattggacatccctgatctacatatttaacttaaagtatcactcattgagcctctgtcagtataatattgctttcaaaaagatagttatgtcaaaagaaaaaatatagctaagtatataaaggcataaaaaacttaagacaattatatggacttattctcaaatattttacaattaaagggttttacataaaaatttttcccttgttttatactggaaaattatataatcgtgatctctaattttcaaacattctcaaaagtttagatcttcagagataagctctgaaaatatagatccatacatataaaatatctatgaaattcttttaaaaactattgtctaactacaaaaatagtggcatatacatgcataaaccatctttaattagaaaatttagtaacattcatgtcaggcatcatcgatttttcttttcttagctcctgtattcttagaaccagattgctgaagcatgtttgcagccttcttctggaagttgcctgaatttttttcctccatctttttatcaccttgttcagaatgacaagtttgagacgattcagcctacaaaaaaaaaaaataacaaagcaagcaccttggtaaaaatccagctattcagttttctcatgagattaaatatttcaaaatattctttctgtatcagttggctttttaagtatacaggggtctagttttttatctacaaatttctattcaaatatgagctctattttgaataaaaggggctacattgtgagagaagttctaaagacctcaaatgtccttagacacaatggcacttgacttgacatgcttttgcagacttgatagtatttggtttaaaacagtggtttctaaccactggaacagcagaaacagacttctcaactattagtaatcacaaccaaataagagcagagtgcataacaaaattagatattaaaacagagtcctcccattccaagaaactggaaacccctagtttatgttaaaaggccagtctaaattctttcacttatatctttacagaaaactatattttctctcttccatacccagaaatctaatcagaaaactgacttttctcatgttcaactggacctaggggaatatgacagaaaagcatcccataggctttaatatactttttaaaatatataaaactgaaaattaatagccatttaccctgaaagagttctgtgtggactttgtcacttgcacagtaatagcatgtgcctcattgttcagaagattagctttaggtcctattttcaaataagaaatggtagcataagctgtaaaactgtagtcttctctgcagaaaatgccaacaataagaaagcttttgaaggaatcacggaaaacaaatttataaaagcaataactatatgcgcagtaatttttaatacattgacttgaaataataaaatttacaagaatgcaaataaagcctttaaagaaaaaaaaagtgggcaaaggacatgaacaaacatttctcaaaagaagaaatagaagcagccaacaaacacatgatataatgatcagtatccctaatctttggagaaatgcaaattaaaaccacactaagacatcatcatacaccagtcagaatggctattattaaaaagtcgaaaaacaatagatgtttgtgtggatgcagagaaaaggaacacactgttggtgggaatgtaaattagttcagcctctatggaagacggtatggaaatagctcaaaggactaaaaatagaaccactgtttgacccagcaatcccacttctgggtatcattatattaaaaatgacacctgcacttgaatgttcatcacagtacctcacaataggaaagtcatggaaccaacctaagtgtttaccaactgttgattttattttaaaaatgtggtatatgcatgccaagtaatactatatggccatgaaaaagaatgaaatcatatcctttgcagcaacatagatggacctggaggccattatcttaagtgaactaactcagaagcagaaaatcaaatatcacctgttctcacttataagtctgcactaaacagtgggtacacatggacataaagatggaaatagtagacagtgggtactccaaaagcagggaaggcaggagggctctgaggaatgaaaaattacctcttgggtacaatgttcaatatttgagtgatgggtacaccagaagcccaatcctcaacattattcaaaatacccatgtgacaaacatgtacatgttccccctgaatctacatttttttttcagaagaaaataagtgattgtttttatttttaggaaactaaacaaatatcattttcttctctctgatctcatagcacttgacaaacaacagggtgtagcagtccaaaccctggcactagaatctacattttttaaaaaaagtaacaattacaaataatatcttctgtatcctattccctattctccctcttcctagaatacattccaatgccttcaactattattttaatcacaaaattgttgatgacaaattgtgatattcaaatgtctttttttcattaatagaggtattactgtataacctgtgaaagaaatgctttactttgataagggaaaatgatgagtacaggagttaaaaaatattcttcttaaactctagactttttgagaccaaacctcttggaatttgtattacttattcaaattgttcagctggaggctattatcctaagtgaattaacacaagaacagaaaaccaaataccgtatgttctcacttataagtaggagctaaacgttgagtacacatggatgcaaagatgggaacaatagaaactgggtcctgcttgagggaggaggctgagaggagggtgagggtcgaaaaactacctgttgggtactatgctgtctacctgggtaataaaaccatttgtacaccaaaccacagcaacacacaatttacccatgtaacaaacctgcacatgtgctccttggacctaaaataaaagttgagaaaagaaaaataaataaacaataatagtggaaaaattcataattttacttctgtgtcatggtcaattaaaattttaatatttagcaaagcaaagaaaaaaattgttcgtatggtaatgtaaaaagataagtcttgaatttctacatgaatcctaaaatttgcaaaataaataaaactaagtttagcagctctctgtatttctttagccatagactaagcaactgttctattattcctttagaaaattccttttgtactcaaattttcttaattctgcttatgcaacagccaggattctcagtatgtaacagtgggttttgccaacttgggtcccagcctaaattctagttatttgttttaaatatttaatgcaagtcagccagaatgccaaaacactatccttattactaagcaatatattaaacaaacacccctgacttgttcctcacccttaatccacagaattgaaacgaggaatggaagaacaaataaattttaacgtaaaataataataatttaatgataacataaaataatacacaaacacataataataattggatgttagtcttttttaaggctttatcagaatattctgtgttaaattggctgggtcagaatggccaataagattttacacatccaaatggctctctattacactgaggaggtttcgttcattcctgtgtgacactgtgttagtgctttgtgcagaattgtttttgtaatatttccttgaaaaaagtgtagaattttctgtctttgcagaacattgaatggtggtgctatatatttattatagcttcttgaagtgtagttatatacaccagatatgtagaaatagaacccacatctcccatgggatgtgtgaatgacagtgtggtgacaaaagcaccccaggggttcaggctaactgttggttttaaagcaaggaaaacttttagttctgtgcctttaatgtgtatgatttactgattgtgtgtatgtgctgaaaaataaaatcattttcaccctgtgggaaaaaaggcagtttgtttgtgtaaggtattaaagactgcatataaatttaatattctccacatagcataaaatttaatgcttgttaagtaaaattgaataaagactctaaaagcaaaacataaacatttcatatttggaaaatttgcacaacagaatgccaaaatatttgttgatgttcttctttcaactataaagcatagacgtatttcctttaaatattatatgaatcctgctgtgatttaaaaagaaaagtggcatctaatcatggaacattaaattgacttggttatgtagtttatggcttatttatcaaaaaagaattcaaatccatttttagaatgaatttctgagatttaaagaatagaaatgaaactaaatgcaaacacacaagaaaataaaaaagcacagagataaattgtctaaaaggctatatttttggtatttttgtttatttaatgaataaacaatatgaattatacagtatctcatctcaacaaaggcaacatttcaatctattgaataaacagtagcataattagccttgagttaatatcccctcctcacacatacacttttctatggttcacttcagtaaaaaggcaaatcttttctgctttagttcctgcatatttagagtgcttaggctaggccaggtgcagtgggtcatgcctataatcccggcactttgggaggctgaggcgggtggatcatttgtgtcaggacttcaagaccagtctggccaacatgtttaaaccctgtctgtactaaaaatacaaaaattagccaggcatgatggcatgtacctgtagtttcagctactcaggaggctgaggcaggaaaatcatttgaacctgggagggagaggttgcagtgagccggtatcatgccactgcactccagcctgggtgatagagtgagactctgtctctaaataaataatattttttttaaaaagtgcttagcctagtactggctgctcactaatcaaggtagcgtgtgctgaaggttgcatggctgtgacaatttcttaaggaagaccatagtattggtaggttttagatattaagtaaatatttttaaaacaaataaatggttattataaatgcagacattaggatgatatttttttaaaaaataaatagccctatgggggaaagttggttttatttcaaagcaccttatttttttggaataattgtgtgttaagaatcaaaacacacatacacatcgaatgattaaacaaataagcaaggaaaacaaataagcaaggaaaacaaacttcttctacattatttttatttatttatgttttaactgaaagtttgtgttctttgatcaacatctcctcaatccttccatatcccagcctctggtaaccaccattttaatctctatgtctatgagtttgaattttatacttcaaatataggtgaggccatgcagtatttgggtacttgtctttctgtacttatttcactttacataatgttcttcatgttcaaacatggtgtctcaaaagacagtattttttttcttttgtaaggctgaatggtattctctggtgtatccaggcacacctcagagatactgtgggtttggttacaaccactccaataaaacaaatattacaagaaggcaaatcacacaatattttttgctttccagtgtatttacagttcttttcacactatactgtagtccattaagtttgcaatagcattatgtctgaaaaatgtatataccttaataaaaaaaaactttattgctaaaaatgctaatgattatctgagccttcatcaagtcataatcttttttgctggtggagggtcttaccttgatgtaaatggctactgactgatcagggtagtggttgctgaaggttgggtggctctaacaatttcttaaagtaagacagcaatgaagtttgctgcatcgattgactcgtcctatcacaaaacatttccttatagcttgcaatgctgtttgatagcattgtattcacagtagtattgctttcaaaatttgaatatgtcttctcaaactctgtgctgctttatcaactaattttaggtaatattctaaatcttttgttgtcatttcaacagtgttcactgagtcttcagcaggagtaggttgcttctcaagaaaccactttctttgcccatctgtaagaagtaacttctcattcatttaagttttatcatgagattgcagcaattcagccacatcttcaacatctaattctagtgctttttgccatttctactatatctgcagtgataccctcaactgaagtcttgaagctctccaagtcatcaccgagggttgaaataaacttcttccaaactgttaatgctgaagacagcttctttaaacctcatgaaccatcctctgctaccttcaagctttcttctgcagcttcctcacctccctcagccttcatagaattagagatctaaggccgcctttctctggattaggctttggctaaacagaatgtaatggctgatttgatcttccatgcatactactaaaactttctccgtatcagcaataatactgttttagtttcttatcatttgtgtgttcaccggagtagcattttttaaaatttccttcaagaacctttcattttcattcgcaacttggctcactgacttaagaggtgtagttttctgcttatctcagctttcgacatgcctttcttactaagcttaatcatttctagcatttgatataaagtgagagccctgcaacttttcttttcacttgaacacttagaggtcattgtagtgttattcattggtctaatttcaatattgttgttctcatgtgatagggagctctgaggagagggagaagaactgggaacagctcgttggtggggcactcagaacacacacgatgttgactgattaagttcactgtcttatacgggtgtggtttgtggtgccccaaaacaattaccatagtaacatcaaggatcactgatcacaggttaccataacacatataataatgaaagagcttgaaatattatgagaattgccaaaatatgacacagagacatgagatgagcatatgatgttggaaaaatatcaccagtagatttgttcaacagaaggttgtcacaaactttcaatttgtaaaacaatgcaatatctgcaaagggcaataaagtgaagcacaataaaatgaggtatgcttgtatataccacaatccataccacaattatccattcatctgttgatggacacttaggtttattccgtattttggctatagtgtttaatgctgcagtgaacatggggtgcagattactgtcatttgatttcattttttaaatatatactcagtagtgagattgctggatcatatagtaattctatttttactttcttgaagaatgttgatactgtttgtcatcatggctgtactaatttccactcccaccaacagtgtacaggggttctcttttctccacattttgctggtactcattatttttcatcattttaatagccattctaacaggtatcaggtgatatctcattgtagttttaatttgtatttatctgatgattagtgatgttggacatttttttcatatttctcttggctatttgtatgtcttcttttgagaaatgtctgtattcaggccttttgcccatttaatttggttgttttcttcttagtcagttgagttctttatatattttggatactaaaacccttgtaagatatatggtttgcaaatattttcccctattctgtatgtcgtttcttcacactgttgatgtttcctttgctgtgctgaagctttttaatttgatagaatctcattgatctattctcatttttattgtctgtgcttttggggtcatgtccaaaaaattgctgttcagagcaatgtcaaggagcttttcctctatgttttcttttagtagttagtttctagtcttaaataggaactattggaactaaagttataggagctatttttgctggaggtcctagtgcaaatactccaagcttaaaggataaactttgcataatggtaaatcttgggggcaagatgacatctatcaatatgttttaaggaaaattcatattgtgattgtttaatttgggccagatataactgtcatttcatatgcttcatcatatcccagctagaagatgaatgttagaggacaaatgaattatttcgtcattaacttagctgatgtaatctttaggaaggggtggaactgcaccacatttaaatgttccttccccttttattttctggaagacactgacaaaatggtgttaattctttttcaaatagttgttagaattttccagcaaaactatttggcctgaagatttttttttcaaaaaactttaaattatacatttcatgtttttaatggttataaaatgattcagattatcagtttcatcttggttgagttttggtagtttgggtttttttcaagggattggttcatttaaactgtcaaattttttaatgtaaagctgtttgtgatatccccttattattcttgtaatgtctatattatctatagtgataacccctatcttgttccttatgttgatttttgtttacttagctgtcattttcatcagtgttgctagactttactgattttattgatgttttttcaaagaaaccatttttttttgctcattttctttattgttttcctgtttgtaatttcattgattacctctcttatggtttttgtttcctcccttctgcttgctttgggtttattttgctcttatatttttcttttctgaggtagacacttagattattgattcgtgatttgttctcgccttgattataagcactctcttcactgctttggctgcatgctacttattttaatatgctgtatttccattttgatttcattttatgcaatttaatttctgttaacaattcctcttttaaaatgaattgtgtagaaaagtgttgtttcattttcacattgttagggatttttctgttgtctttcagttattgacttctagtattatttcacctagttaacatactctgtacaatttcaacttttgaaatttattctggtgtttttttatggcctaggatttggtcggtatatgttccatgatctccttgggttttttttttttttttttttttaaagaaagagtattctgctgttgttggattgtcaaattattttagatattaattagatcgtatttgtagattttgttgtttttgtagattttgttgttaaggtatcagttttctgtggctactgtaacaaattaccacaaacttggtagcttaaaacaacataaatttattctttcatagtcctgcatgccagaagtcaaagtgtcaaaaggaccatgctatctccagaggctctggggtagaatccatttcttgcttcttctagctttttgtggctgctggcaggtcttgaggtttcttggcttgaggtcacatcactctaatctatgtctctttcttcacgtcaccttctcctttgtgtgtggtgtgtgtgtgcgtgtgtttgtgtgtctgtgtgcatgtgtggtctccctctgccttcctcttgtgaggccactcatgacgatcaaagtatcagaatgtataatattatcatatttgtctcagtcatcgcatatgatttagacaactcatgaggagaagataatctatgtatttacccatacttctagtccttctgttccttttcttccttcctggtgctcaaagatttttttctcttatctttttctttctgtttaaagacctttctttagccattcttttttattattattattatactttaagttttagggtacatatgcaccctaaaatgtatcttggagtgaattcctttgagtttatccttatttagaatccatatagttgaatttgtgggtttatgtctttcaccaaatttaagacattttcatctatagtttattcaaatactatttcaacctcactctcccctatacttttggaactcttaggatatgaatgtggatttcttttttattgtcctaaagatccctaaaactttttttcagcctattttctctgttgttcagattgagtaaattctattaagctgtcctcaattcactgattctatcctctgtcatctccattctaattttgagcccacccagcatgttttctatttttgttgctgtatttttcagttgtataatttacattggttatttttatatttctattgctttactgagattttgtgttttaaaattcatttaaaaagaatttataattgctcgttgaaatattttcttatgccctctttaaaattcttgacagataattccaacatctgattcattttagtgttggcgtcaatcgattgtcttttctcattcaagttgtgattttcttggttcttattatgattcttatgatggttgactttctattatatttttgataatttgggtattgtgtttgttaggagactctagattctatttaaaatttttattttaacagtcaattcctctatttaggtttggcatgtaggtcctggcctacttttgtgggttttagttgcaatgactgtgtaattttcagaggttatgtggtgctattttcatcttggtttatttcatgcctcatggctcccactgtccttggtaatgctgcttgagggtgcagagcaagcttctccaggtcagatatccttatgtctctatatggaggggatttttcagcccatgtggatgaagagtaattcctagctgggcatttgttgtgcaaaattactcttgctggtgactctagccatacaatttcttgagtagtgagttatggtgggtgtgagagggagaatatcaggacattaagaacatggaagcttctcagactgggcactgtctcctgcttttttagctagagctagttctttgaaagcaaatgttgctctgtgagagcagtggcccttctggaagcccctttaattattgaagcacccgggacatatcattctgtttgtgctttcataaattacattgcagggatctgaaagaccagaaaccaaatctagaagtgcccattttttgttactgaactgaattctaaagaatagtcatgcaaatctatatcagcagctacatctatatctgtagcaacaacttctctcttttcaactgcccattgtgaacatctctttaaggttgttttgccatcacattgatttatatttaaaattgtaattgcttcgcttctctctccttcaccttcaggcttctacagtggttaagagtgtttcctttggagtcagtccagtttgggtttgagtgttgaccttactgcttattagcttgtattctttacaaatctcttaacctccctaaatcttaaaactgaggatagtaatagctagcaaaagagtaaaattcagtaacaaagtataaattaagtattaattaagtactcagcacagtacatgggcaatagcaagtactcacagatgtgttgagttagctacaggcatcatcctcctcaacatcattatcatcttttccagtttatagataaggaaaccgaggctttgaaaggatagggaactgaacgtaggtcagttttcccacttaattttcaggagagttgaaattcaaattcagacctgacttcttccaaatccttcttttcaaactattatgtaacactgcatcaaatgattttcttataaaacctgaagctccatgagagcatggattaggccatgctcaagataggcaaaaatataaaacatgtaatgtgcagttatatgacctggacttactcaattctgattacttattgataacagtggtgaatattttcatagaactatctgagcattaacatgcaacaaacccccatgagatgaatttacctatataacaaacctgcacatgtaccccccaacccagcataaaagtaaaatgaaaaaagaaataatgaagatagtttaacagaacctgacaaccaaggtttgtgatagtatgatatttaaccctttactatagctcagagcaaaatactcccctttgttatgcttgccaatttctgaaatctgacaaatgttatgacaatttatttttcttatgtcttctgtgctatctcattgaaacttcaatatgatgtaagatgcaataaaaccttagatagatgtttatattttaagcaattttccacaattcttttatatacaaatatgtagttcttataatagttttgcttattgctaagttaataaatgcaaataatgatgaatttctgaagttataattatgagaaacataattcaagaaggataatttatattattttccaattaaagtaaaaatgcattggtgacagagatacaaatggtgccattgaatctgcccatttattaaataaaaagttcactgatagaaaatattgaaaaggaagttatttactttatttctttgggcttatcgtctatgaattgtttttctgtagtgtaggcaatcaacaacattttcttccttcagggtctgtttatgtagagatttcagaaaacaaactaatggccacatataagtcaaggacatatttgctattttacatttttgagacaggaatgtgaactattcaatttagactttttataaattaatatttaaaatgcattacatataggaaataatatatattaatttatgcatacatacatacactaattccacatttaaaattaagatggagatgataaaggcaaaagagaataaggtctagttgtgatggtaaatgttaaagttgatacctaggaagaaaagagaaagaaaaagaaaacaggaaccaatggaaaaaaatgagagtagagtccaagcgatgaagaagagagaccagcagaaggagagacaaacaccaaataaagagaggagggtgaaaaaagtgtaactccacgaagcaagggagaagaaagaagaaatcaagatggagaagaaaaaagaagtaattggaaagaaatgtgaagagagagagagagactacatagaagtttaaatatatgagtatcagatgttatcattgccatttaaaaatatgattaactctattaagcttatcaaggtttttgcgcttatgtcaatcttaaaaaaatttatataataatttttaaactatgggattgtacattatgtgtttcttccttaccatgcccttaagatcctaataacaagaaagtatgtattattagcaacactcctaccctaaagagcatatgaaacatatacaaacaatctgtaaatattttacaggacaattattttctttttactcaaaccataacctgtagtattttgagagcctattttaggtagtgaatttagaatgtcttcctcctcctattctctggccgatatagatttggttctccaccatactgtgatacgtttgaaaaggggaactgtattttatctttctatccttatcatccagagcagagcattactagtaaatagaaaataatcaatattttagtgaataaataagagtaatataaataaaaggatgaaatactgaactttagcagaaattttacataaggtaaagtgagcatttaattccataaaaattataacatcaagcaagattccattttattttcttatataaacaagatcttggtgaatggtacaagggagaaaagtaaaaatattaatgacttaaaaatccagatcccaatagtttattccatatttgttcagtgccaccagtttttatcaactagcttaactatttagctataaagaaaacaggaaaatacatgtattgagcacattccatgtagtagtggaacatagatgaaactgatgcacagtcccaactggtcaacttttagcctattctttctaagtaattgcaactggctttttctccaggtgtgcttagtttaaccttagtccaatccaaatagttatagttgtagccataccccagctccaccttccttttctactggtgttcattgttcatgccctctgaaggtgttcattaggctactgggcataagcttgtgttcactaagtttcccattaaatctcagttccctaaattctccagtgaaagggcatagaaaagaggaatagatttaaattactttaccctcagattctttatcatatgacccaaattcctttagtattataattattattttttcatttatttttagcttatatgaacatgctagttgagtgatattttctgataatgctagcttaatatctggtttatatttttatttttaagaataagagaactgtccactaacctaacaagtgcaatgactagtacattttaaaagtactataatagttgaaaaatgatttacataaggccaattactttgattcattttaacctcctggatttattttctgaaaggggtattattttaatgacagttaaatatagttattttgacagatggatttaccatattttcattattatttagtaggctgaaagcttttgaattggctcataaaccagtttcatgatgtaccttggagtatcatcttgaataaaaaatgttttcctgtttcatttttcactgatctcactttccatttcattattgtctttagaaagtagctgagtgagatataaaacaattgtttctcttcagaaccatgaattttaaactggctgaaaatcagatttaaatttgcttatatgaatgcagtaactcagtattgctaataaaacattttttctttctattcatcagataatatattaaattttgtgaacctactatgtgaagagtactgatcaaaattccatgttaatttcacaggtgatggaagtcaaaggacaaatgatccatgttccagaatcaaattccattttatttttgggctctccatgtgtggacaagttggatgaactcatgggccgagggctacatctctcagacatccctatccatgatgccacccgagatgtcattttggttggtgagcaggcaaaggcccaagatgggttgaagaaaaggatggataaattaaaggcaactttagaaagaactcaccaggccctggaagaagagaaaaagaagacagtggatcttctatattctattttccctggtgatgtagcccagcaattatggcaagggcagcaagtacaggccagaaagtttgatgatgtcaccatgctcttttcagacattgttggcttcacagccatatgtgcccagtgtactcccatgcaagtaatcagcatgctgaatgaactgtacaccagatttgaccaccagtgtggatttttggatatttataaggtaagggagtttagttacttacatataaatgttttttaatagtaaattgtcatgtgaattaaattgatttttttacttaaacttgatactaaataattgacaactctttaatttagaaattttatagataatacaggtatttcttctttatgagtaaactttcaatatgagttcgtttgtgttgacatagataactgtgaagaatcatgatattgctcagtaaggaaaaattctatatagctactcctctaagtttatttttattaaaaaattaaacttgttgaattctaggtaactttttaccacataattattcttgcttagaaaatggggttccaatataaactaagaattttattttgacagttaaaaacaaatagcaagttatattaaaatatgcattgtattgtcaaatatggctaatcagtattttgcactgcattattaagtgagatctctttaattctaaaaaaacctatatataaatactctagctattgctcaaatgactaatgagtttttgaggaagtaccttaattttccaagctacataatggaaaaatttccaaaattggtgccaaccaccatggttggtttgatttggtgaactccttattaatttcttactaagatcatagcaatattttgagtcatttagctccatatctacctaatcaataactctacaactttacctagaatcttacgtagattgcacaatgtcagggcatagggctttttttatatgaagggaatcaagtacttttagtataaatagttgtgagctgcaggttttattttcttctttactaatacatattgaccagctacttatttttacagtatgatcttcacataagcagatttggaaagaacttgtctgattcactttgtaaattttatattatcatccagaaggtgtttttatgaaggtgtgtcttcttggggaaatgagctctttagtttcattatgtagactatgtagccaatgttaaatattttaattgaatctcttctgagtggtaaacattcagtatgaagtatgtataagggattttccttgttacagaaaattaagttcttataaattatctttaactcccttataatttattggtatataatttacagcagtggtagccaaatgtctgattctaaaccggagagatactataatgttaaactgtcacttccaggacagaggagatcagctgaatttggcatcactttccttcctccatacttggggcactattacaccaatctctgccacaaccaatcttttccctctaaactactgatttgcagtgtttgcttcctccagttaaagcagtcatgttttttttgttttgttttgttttgttttagccctaagttcatacaactaaatgagaatgataatagataaataaattattctctggaaaaaacatgggaatccctgacaaacataagtatcagttagattttgagaaaagaagaaatgtgatgcttctgagtatgccaaaacaggttcaaggttttaaaatatgatttgatttcttagacatcaagcattcattcccttgtgagttaggacatctcacagaaaaacagtagaaatactccgtatgatcttcaaattttcctatatattattaaaccgtggacagtttcatatagtcatgaataataatcaacaagttttaacttacaaaatgtttatataaatatatatatatacacacacacatataataattctagttcacaacttttcttaaactaaacttgtttaggaaattttgcaattaattacaactaaagattccaggccttggtgttcttaacatatcttcaatgctagtgtattaatcagggttctctagagggatgggactaataggatagatgtatatatgaaagggagtttattaaggagtattgactcacacagtcacaaggtggaatcccaccataggctatctgcaagttgaggagcaaggaagccagtccgagttccaaaacctcaaaaagtagggaagccaacagtgcagccttcagtctgtggccgaaggcttgagaaccctgagcaaaccactagtgtaggtccaagagtccaaaagctaaagaacttggagtccaatgtttgagggcaggaagcatccagcacaaaagaaagatgaaggccaaaagactcaggccagtctagtccttctacattcctctgcctgcttttatcctagtcacgctggcagctgattagatggtacccacctggattgaaggtgggtctgcctctcccagtccattgactcaaatgttaatctcctttggcaacaccctcatagacacacctaggaacaatattttttatccttcaatccaatgacgtttacactcaatattaactatcacagctagtaagtacatgtatctaggataggtgtatagggcagctttggctgcttattcaggattagggaggttgagtttgggagatccagactggaaatacaatatatgctaaatccatagcagtaatggtttggccagagagggaaagacaaaatgatattagtcctgtataggataaaaaaagtacattaggagaaatgcattaggagggatataaattagaaaacttctatttgaccagcctgatttgtaatcttcataaacattctagtgtattttctagaaaatacacacagtgctattttaaaccatgaactatttgccagatttttaatggctattgaaacaaagaatcccagaggtggtagaattttttgtaaggaccacaagtcttattttatgaaatgaaaagagttttgctagattgaaagtatgtatagaatttgggtaattatgtagaataaccataccacagagaaaaataaggtacagcccaccttttatgttagaaatgtgaaaggaagccaggtaaaactaaatgccaagagaaaagaactagatggagtggcccacatggggctttcatagtgtgctacgacatgagatactagtctctaaatttgtggttgcccctctcttcttcatgtcattactccatgttttcctatcatcaggcagatgatagagtgaagaattataatttcagtggtagaattcagataaattaagacataatatgaccattctgctaaaataatcaagctatctataaactagagggttgaggaagaagctgtggattttgctgtgcatatatcaagcactgagaaaatgaaagcctttccaatgcttaactgccaagatgttacaggtgtatgaatactaagtaagagctaggcaaattgaagaaagcctgggttataattttgtttctcttgtaattagaaaggcaaattttcagtaaaagtcaacataaacaacatacgtaatattttgcttctcagattgttctcacatgaacataaagaaccagtatctaattttgtaaatcaatggcatataaatagtaacaataataatggcattgactattgaagcaaattcatgtacattttgctttgttttacatttgtctttgggaaagcctttgattttagataagcagggagaaagactttgcctttctctgattccattctgccatggttgcagtgttccagtgctattttaaatacaatctttagcatccccatcttttcacctttaagcactttaacttgacttttctccagttctataccccataaaataaagatattcagtgcatcagtctcacagttacatcataagcatttcagtgagctttcctataaagagttgagaataccatctggtacatagtagtaaatgtaaatattagctgccattagaacttctcagacaggtgtatctatctagacatacagggatgtgtgttatgtgattatgtttgtgtgtgtgtatgtgtgtgtgtgtatatatacacacatacctagtaggcccagagctttttagaaaagaataaaatatgatctcatataatccctccttgaataacatgtggcattatgtacattttcggataagaaaactgagttttggaaaggttaaatccagataatgtagctcacaagtcagaatttgaactgagacttgtctgattctaaagcctatagtttttgtacaatttaggctgtgatctagacaaagatcaaatgatagaaacaaagagtggaaactgtttaaaaatgacatgacagtataactacagttattgattctgtaaagtaggagattctcccgtctgccatcttttctctttgttagaaaccagccagcacctctgtcttcattcctcctatggaaagtggcataccaaaagaggcattgtgggagcagtggtcccaggtgcaggcaataagaggtatattttttaaacagtgaagtggaataaaagttgatctggttttaaaaatcatcttacccaggtaactctaaaaatgttagtgatggccaggcacggtggctcacgcctgtaatcccagcactttgggaggccgaggtgggtggatcacctgaggtcaggagttcgagaccagcctggccaacctggtgaaacgctgtctctactaaaaatacaaaaattagccaggcatggtggtgggtgcctgtaatccaaactagtcaggaggctgaggcaggagaattgcttgaacccaggtggtagaggttgcagtgagctgagatcacgccactgcattccagcctgggcaacagagtgagactacgtctcaaaaaaaaaaaaaaatgttagtgataaaatagttttctctgtcagagtaaaggtagagggggagtattcccatcacagcctctaagtgtggtttgcaaatgtccatggcattaaacattgtcaggtttagattgggaagaaggaacagtaagacaagatagggcaaccaggtaataccaggacccaaattctattacattagggaacctgatgttaaaaatctgaaaaacaacaacacaaagttcatattggcaaggaaatgtaagtattataagcctagctggaaaagcagagttcaggccaattagcaaagtaggaaatccaggctcactcacagggaatatgagtgggcccaaggggactagatgataggaactggaaaccaggcaacatgtctagatagaaagtataaatatgggtatcagtacaaactttgataaagaagcagagtcttttccctggacagaattaagcttagaatcagagggtgcacaggacaagtctacagtgtcaaaggggaactgaatatggcaacctcatcaaacatctgaaaacagatgtttctgacatagagttttagggctacacagctttatgcctcaagaattttgatttgtcttgccacttgataggaagctactaaagccctctcttcttcgctggaccttcagccagcctctagaaaatgcagtagattctcaaggatatcacttcagcatgaaatagatttcacagaaaaatgaaatgcttcacttccaccttgttttgttgcctttcaaagtacttaggtacttaggttattgttggaattttataaatatgtatatgccattttacgtcatttgcagcatgaaatgccagttccatttagtaaagagtaactgcttcatttttccccaagatttacatattttctcttttaatgatcagtgcacacactttttaaattgagcactgtttcagatttatgttagttctcttcagtagtctccatcaacatcaacatcatttgcttttactgatattttgttggaaacaaagcaacaatgttttctaattaggaaataagaatttcttaagtcaaaaatttattcaactcattcattcactcaataaacatttacaactcatttgataaggagccatgacttccatagaacctttaaaatgttatggaaattagcatgtatttttagaacaattttaatgaatagaaaagaactcatttatatgctgtaggaagtaaggtgaaagtcacagataagcattctgttccaatagcttttctatggcaggagttatattgtcagtttcaaaataccataatgctgtaaaaattacctgaagagggtttaacctcatttatacgtttgcctttggcgagcactttggttggagataaggaagaggcaagggtaagatatgtttctttcaatccattcagacaaggctgtggaatcccagtgctatcttgagtgcactagttggatttctcatcattccacctttcatgggttatttaatctctctgcctcattttatcatctgtaaataagagactaattttatcactttatagttttattttgtgagcttttaaatgagatttatgtaaagtgcttaaaacagtgtctccttcatggtagtaaatgtacatattagctattattactttccaaacaggtatatctggtcctatatgggaagcgcgtgtgtctgtgtgagtgtgtgtgttgtatatctgcaggcatttttatgtacataaacattgtgtatccaacgcttactagaaatagataaaatgcttatttatttggatttattcttttaggttattagaattgcattgtatgccaaagactgtgaaggaaggatagagaaataaaaggagggagggagataaatagctttccgaaatgcattatttgtgtcatcttcatggggcctcaaagattcttaaagatgcttccatctgcatactctgaattacaatatggaatttataaagatgacaatatttctgaaagccagaatgactcgtgggatgtctgtgaccaatactatgaaactgaaccccaaatgtctatttttatattctaatacggcagcctgaattatttttcttctatattcagagaacatttcttttagtgttgtggcatattctgaagacagttagaaggctaaaatacttttagttgctaagcagaagttaatattaatgatgtgtcttgctgaatttttcaaagtgttttgaggtttttgtccctatcgatatttaatttctgaagagtggtggcaactgcaaacagattggtgtttttgatttttacaaacagtatgaactgaatatttatgaccccccaaaattcatagttgaagccctacttaatgtgatattatttagaggtagagtattttggagttaatcaagtttagatgaggtcttgaaggtggggacttcaatgatggaattagcatcattataagaagaagtgacttgagcttgctttctttcctctttgaggacacactaagatggcagccacttgtaagctaggaagagagccctcacctgggaagtgaattggctggcatcttgatcttggactttccagcctccataactatgaggaataaattcctgttgtttaagccacccagtctatggtgttttggtatagcagcctgagcagactgaaatcccaagagaaggtatatcacttctacagaaagtgtggaaatttcttcatgatacaagtctctagtaagttctcttagtagattagtccatattgctaggatttcctgtatctaataagaataaatgctaccgtcccattgatgcaaatgaaagattttcattagccttatagagttaattgtgttattgcacagtatctctcttttgtgtatcaataaactgtaaagaatttaagctgtaagctcaaactgctcatttatctttgccactaccacttcagcagaacagtatgaacaacttgcctttagtttatacatagggtgagtttactaaaatggaaattcattttctaggcaggaccgctatctctcactcacctgataggatagccttaatgcaatctgcaaatctcactgaactgaggtgtttctattacctttttaaaacaaacaaacctttaattaatgcttttatgtagtagaaatgctgtaaatacttctgccactatttatcacttaataacagtgatttaaaaagtgaaaatttctgaaagcaaaatgaaactaacagaattcacatttacttgtattctcagtattaagtgcttaaactgtgatatttcacttattttccagaacaatcctgtggaataggtgttatgatgtcccttctgtgtttttaaatttttatttcaatttttgtgggtacatagtaggagtatgtatttatggagtacgtgagatgttttgatacaggcatgcaatgtgtgataatcacatcatggaaaatggggtatccattccctcaagtatttactttttgtgttacaaacaatccagttagacccttttaaaatgtacaattaaattattattaagtatgatggctctgttgtgctatcaaataataagtgtcccttttgaagatgagtttagtaagttgcagatgctacttgaatttagttctgatttagttaaaagctcaaattttagaaagcaatggtttaaatcattcatgtgtcagatagctagtgtttccaattacctagatggagaatcaggacaaaaaaattgttctggcacttacatactataggttagtgcaaaagtaattgtgggttttgcccttaattttaatacataaaatgagatattcatttatcaattggtacggtctctccaacaactttgacaaattaccagagttcatctttttaaaatgaaaacaatagtatgtcacaggactgttatgaggctgaaaagaactatgagccaaaggtccttgttacaaacatgaggccctcaatgtagtaattagaagatgaacatgaatttgtaaattgcaatttgaattctaccctagaggtaaaaatataactaggtttccttttttaaggtattcaacaaatgtgcactatttttgaatatgtgttggatatcataaatacttattctctttggctcccggaggttaaagaggatctttgtacaaaagttaaaagaatagtttcagcacagtagaagatccttaagaaaaaccgtgtttctaacagtgaaatagactggcagaagcatatgctctgatcacaggagtgatatgccacaaccttttggtggagcaggtaggaacaactttcagtaggtcccctgattctatgagattcttttttttttttatactttaagttctagggtacatgtgcataacgtgcaggtttgttacatatgtatatacatgccatgttggtgtgctgcacccattaactcgtcattttcattaggtatatctcctaatgctatccctcccccttccccctaccccacgacaggccctggtgtgtgatgttccccttcctgtgtccaagtattctcattgttcaattcccacatatgagtgagaacatgcggtgtttggttttttgtccttgcgatagtttgctgagaatgatggtttccagcttcatccatgtccctacaaaggacatgaactcatccttttttatggctgcatagtattccatggtgtatatctgtcacattttcttaatccagtctatcattgatggacatttgggttggttccaagtctttgctattgtgaatagtgccgcaatgaacatatgtgtgcatgtgtctttatagcagcatgatttataatcctttgggcatatacccagtaatgggatggctgggtcaaatggtatttctagttctagatccttgaggaatcgccacactgtcttccacgatggttgaactagtttacagtcccaccaacagtgtaaaagtgttcctatttctccacatcctctccagcacctgttgtttcctgactgtttaatgatcgccattctaactggtatgagatggtatctcattgtggttttgatttgcatttctctgatggccagtgatgataagcattttttcatgtgtctgttggctgcataaatgtcttcttttgagaagtgtctgttcatatccttcgcccacttgttgatggggtggttcttttcttgtaaatttgtttgagttctttgtagattctggatattagccctttgtcagatgagtaaattgcaaaaattttctcccattttgtaggttgcctgttcactctgatggtggtttcttttgctgtgcagaagctctttagtttaattagatcccatttgtcaattttggcttttattgccatagcttttggtgttttagacatgaagtccttgcccatgcctatgtcctgaatggtattgcctaggttttcttctagggtttttatggttttaggtctaacatttaagtctttaatccatcttgaattaatttctgtataaggtgtaaggaagggatctagtttcagcttcctacatatggctagccagttttcccagcaccatttattaaacagggaatcctttccccatttcttgtttttgtcaggtttgtcaaagatcagatagttgtagatgtgtggtattatttctgagaactctgttctgtaccattggtctacatctctgttttggtaccagtaccatgctgttttggttactgtcaccttgtaatatagtttgaagtcaggtagtgtgatgcatccagctttgttcttttgggttgtcttggctatgagggctctcttttggttccatatgaactttaaagtagttttttccaattctgtgaagaaagtcattggtagcttgatggggatggcattgaatctagaaattacctcgggcagtatggccattttcatgacattgattcgtcctacccatgagcatggaatgttcttccatttgtttgtgtcctcttttatttcattgagcagtggtttgtagttctccttcaagaggtccttcatatcccttgtaagttggattcctaggtattttattctctttgaagcagttgtgaatggagctctctgtttttctgttattggtgtataagaatgcttgtgatttttgcacattgattttgtatcctgagactttgctgaagttgcttatcagcttaaggagatttggggctgagacaatggggttttctaaatatacaatcatgtcatctgcaaacagacaatttgacttcctctcttcctaattgaataccctttatttctctctcctgcctgattgccctggccagaacttccaacactatgttgaataggagtggtgagagagggcatccctgtcttgtgccagttttcaaagggaatgcttccagtttttgcccattcagtatgatattggctgtgggtttgtcataaatagctcttattattttgagatacgtcccatcaatacctaatttattgagagtttttagcatgaagggctgttgaattttgtcaaaggccttttctgcatctattgagataatcatgtggtttttgtctttggttttgtttatatgctggattacatttattgatttgcatatgttgagccagccttgcatcccagggatgaagcccacttgatcatggtggataagctttttgatgtgctgctggatttggtttgccagtattttattgaggatttttgcattgatgttcatcaaggatattggtctaaaattctctttttttgttgtgtttttgccagcctttggtatcaggatgatgctggcctcataaaatgagttagggaggattccctctttttcttttgattggaatagtttcagaaggaatggtaccagctcctccttgtacctctggtagaattcggctgtgaatccgtctggtcctggactttttttggttggtaggctattaatgattgcctcaatttcagaccctgttatgggtctattcagggattcaacttcttcctggtttagtcttgggagggtgtatgtgtccaggaatttatccatttcttctagattttctagtttatttgcgtagaggtgtttatagtattctctgatggtaatttgtatttctgtgggattggtggtgatatcccctttatcattattgcgtctatttgattcttctttcttttcttcttttttagtcttgctgtgtggtctatcaattttgttaatcttttcaaaaaaccagctcctggattcattgattttttgaagggtcttttgtgtctctatctccttcagttctgctctgattttagttatttcttgccttctgctagcttttgaatgtgtttgctcttgcttctctagttcttttcattgtgatgtagggtgtcaattttagatctttcctgctttctcttgtgggcatttagtgctataaatttccctccacatactgctttgaatgtgtcccagagatgctggtttgttgtgtctttgttctcactggtttcaaagaacatctttatttttgccttcatttcattatgtacccagtagtcattcaggagcaggttgttcagtttccatgtagttgagtggttttgagtgagtttcttaatcctgagttctagtttgattacactgtggtctgagagacagtttgttataatttctgttgaggagtgctttacttccaactatgtggttagttttggaataactgcgatgtggtgctgagaagaatgtatattttgttgatttggggtgtagagttctgtagatgtctattaggtccacttggtgcagagttgagttcaattcctggatatcctttttaactttctgtctcgttgatctgtctaatgttgatcagagcgcctctccccctccaaaggaacgcagctcctctccagcaaggaacaaagctggacagagaatgactttgatgagttgagagaagaaggcttcagacgatcaaacttctccgagctaaaggaggaagttcgaacacatcgcaaagaagttaaaaccttgaaaaaagattagacgaatggctaactagaataaccattgtagagaagtccttaaatgacccgatggagcagaaaaccatggcacgagaactatgtgatgaacacataagcttcagtagccaatttgatcaactggaagaaagggtatcagtgattgaagatcaaatgaatgaaatgaagcgagaagagaagtttagagaaaaaagagtaaaaagaaatgaacaaagcctccaagaaatatgggactatgtgaaaagaccaaatctacgtctgattggtgtgcctgaaagtgacaggaagaatggaaccacgttggaaaagactctgcaggttattatccaggagaacttccccaacctagcaaggcaggccaacattcaaattcaggaaatacagagagcaccacaaagatactccttgagaagagcaactccaaaacacataattgtcagattcaccaaagttgaaatgaaggaaaaaatgttaagggcagccagagataaaggtcgggttacccacaaagggaagcccatcagactaacagctgatctctcagcagaaactctataagccagaagagagtgggggccgatattcaacattcttaaagaaaagaattttcaacccagaatttcatatccagccaaactaagcttcataactgaaggagaaataaaatcctttacagacaagcaaatgctgagacatcctgaaggaagcactaaacatggaaaggaacagctgttaccagccactgcaaaaacatgccaaattgtaaagaccatcgatgctaggaagaaactgcagcaactaacgagcaaaataaccagctaaattcataatgacaggatcaaattcacacataacaatattaaccttaaatgtaaatgggctaaatgctccaataaaagacacagactggcaaattggataaagagtcaagacccatcagtgtgctgtattcaggagacccatctcatgtgcagagacacacataggctcaaaataaagggatggaggaagagctaccaagcaaatggaaaacaaaaaaggcaggagttgcaatcctagtctctgataaaacagactttaaaccaacaaagatcaaaagagacaaagaaggccattacgtaatggtaaagggatcaattcaacaagaagagctaactatcctaaatatatatgcacccaatacaggagcacccagattcataaagcaagtccttacagacctacaaagagacttagactcccacacaataatagtgggagattttaacaccccactgtcaacattagattctatgagattctaatattctaaattcttagtgttggagctatatgtagtttgctaggaaaatgttttcaaactgcaaatcaatgctgctgcctccctattaataagttttaaatgatttgtgtttatttttgcaaacatcttttaaagtggaaagatgagaatttaactctgtcatcttaaatttgggttaaaatggatataaataagttttgatgcatttttcaagctttgaaatgggtaacatgactttcaagttggaaaaagataaatcagttgaaacaaaatcgctgtgagactgctgatttagctgtgagtatgtgttgggatggagggcatgcacatgcataggtgcacatgtgttggagtctatgaaagctgtctattaagataatgctgttcttaagattgtccaaagcatttttaatgttatattttcctgtgatagtcagagtttaatattggatagctttttatgctgtcatcaaagggcaacttcgtgcttctctctttttcccttaccaaattccataattagtgtcatcgcctcatatccagtcgggcatatttcagccctctgcttaatataaggtcctttgacgatcagagagagcccagatgaggactgttgtagttgcctatgacagtgcaatggtagctaaatgtaggggaaagggtattgaagataaagtctgaaaacctgattttaattatatctttgtcacataactgagtaagtcacgtaacttatctgtgttcagcttctgcatctataaaatgggagcagtattataggtctcacatatttgttgcagttgacacaaaaaacttgttcagcaaatgattgtttggaatttgtctattcataattcaaaataacgatatatatgtggaaaattgttgtaaattaatcaacagtatcagcaattgactccatctggagttattcatatgaaagaagaccaagatcagagagaatgtctttaggaatttgctatgaaagaagggacagggactgatattagttgaatgcctaatatgtgctaggtaccatgctaaattttttatatgtttattcattactttcattttcaataaataattatcagtcacatactgtgtttaagtgctaatctaggcattgggtaataacactattgagatatttattttattagatttggattttatttattggattttatgtgtttatccagcttttttgggttatattaataattaaataaaaatagtataaatttaaggttgacaatgtgacaatttgatatatgcatagattgtataatgattattacaatcaaattaatacatagttgatctattatcagacataattacctttgtgtttctgtgtgtgtgtgtgtgtgtgtagtgaggacatttaatatctactctcagcagatttcaagtataaaatacagtattagttactatggtcagcatgctatatggtagatccccagaatgtagtctttataactgaaaatttctgccatttgactaacatcttcccatttcttccaccctcaccccttggcaaacaccattctactctctgttcatatgagaaactcagagagttatttggattccacataagtgagatcatatagtatttatctttctgtgtctggcttatttcacttagcttaatgtcctccagattcatccacaaatggcaggattttgttctttattatggctgaatatttctttacatacatctgtgtgtgtgtgtatcacattttcttcatttatctgttgatagacacaggttgatgttacatcttggctattttgaataatgctgcaatgaacatggaagtgcagatatctcttcaaaatcctgatttcatttcctttggatatgtatccagaagtggagttgctgaaaattataattttacttttaattttttaggaacctccattgtgttttccataatagctgacccaatttacatcctcaaaaactgtgtacaaatgttcccttttctccatacactaactggcatttgttatctcagacttttgataatcatcattctaacaggtgtgaggtgatatctcgttgtggctttaatttgtacttcccttatgattactaattttgagctgtttcatatacctcttggccatttttaggtattctcttgaaaactgtttattcaggtcctttgttcatttttaaattgggctgtttgttgtttttgctattgagttgtatgagttctttgaatattttggatattagcccctcatcagacctgtgatttgcaaatattttctccccttctgtaggttgcctttttcattatgttgattgctttttttttgctatgcagaatatttttagtctgatgtaatcccacttgctaatttttgcttttgttgactgtgttgttgttgtatccaaaaaactcattgctaaggccagtgtcacagagctttgtccttatgtttttagctaaaagttttacagttttgggactcacatttgtgtctttattccattttgagttgatttttctgtatgtcataagagaaggatctaatttcatttccccaaccctatctagctgcccaaccaatttattgaagagaagattcttcctccattgtgttttcttggtgcccttgtaaaagattgtgtagatttagttctgggatctcattctgtcccattggtgtatgtgtctgtttatatgcaatcaccatactattttcattacgattctgtagtgattagtttgaaatcaggaaatctgacggctccagctttgttcttcattctcaagattattttggatattgtagttatatatgaattttaggattttttttctatttctgtgaattttgatagggattgcattggaatattgatagagattgcattgaatctgtaatcacttcgggttttatggacatttttacaatattaatttttccattccatgaacagatatttttccactgatgtgtcttcaatttctttaatcaatatattatagttttcaatgtacacatcattcacatccttgatgaaattaattttaagtagtttattctttttgttgctactttaagtgggatcattttcttaatttctttttcaatactgtgttgaataggataggcaagagaaggcatccttgtcttctgctgcttttcaaggagaatgcttccagcttttgcccattcagtatgatattggctttgggcttgtcatttgtgatgcttattattttgaggtatgttccttcaatacctattttattgggagtttttaacatgaatggatgttgaattttattgaaagcctttttctgcatctcttgagataatcatgtggtttttgtctttagttctgtttttgtgatgaatcacatttattgatttgtgtatgttgaactaaccttgcaacccagggataatgcctacttgatgatagtgggtaagctttttttttttttttttttgagatggagtctcactctgttgcccaggctggagtgcaatggtgtgatctcagctcactccaacctctgcctcctggattcaagtgattgtcctgcctcagcctccccagtagctgggattacaggcacccaccactgagcctggctaatttttgtatttttagtagagatggggtttcactatgttggccaagctggtctcgaactcctgacctcgtgatctgcctgccttagcctctcaaagtgctgggattacagacgtgagccaccacgcccggctgttagtgggtaagctttttgatttgttgctggattcagtttgccagtattttgttgaagaattttgcatcagtgttcatcaaggatgctggccctaagttttttttctttttttattgtatctctgccaggttttggtatcaggatgatgctgcccttacagaatgagttagggaggagtccctcctcaattttttggaatagttttagtaggaatggtaccagctcttctggtatgaaacgtaaatgagtttagtataagatatataaaaaccaaattttattggtgttctaaaggaatcaaatgtattattctgctgaggactggggatactttcagaaaagatgtggcatgagaggtggacttggaagcatgtgacaaatttgacttctggaagagggactaggggaggccttttttaaatctatatttattctgaaaataaaagatagtaattccgtagatatataaaaattgtaggatttatgggttaagatggtctcctttaaaaaatgaattattgaggggtggatcaagatggaagaacagaagtttccactgactgtctccttcacagggacaccaaattcaacaagcacgtgtgcacatgcacacacacacacacacaaatacctccataagaaccagaatcaggtgaatactcacagtatctgatttaaacttcatatcgctgaaagaggcactgaagactgtgggaaagacagtcctcaattgttgacactataccttcccaattccccctgtagtagctgcaaagcatggagaaatttgtacactggagagaaggagactgcagtgattgtgagactttgtattgaactcagtgctgtcctgtcatagcagaaagcaaaaccaggctgaattcagctgacactcacacagagggagcatttagaccagccctaggcagaggggaatcacccatgccagtgttcagaacttgagttctgccaaaccttgccaccatggactaaagtgctctggagtcttaaataaacttgaaagtcagtccaggccacaagtactgcaagttttagtgctgagctgggcctggagccagtggacttgtgggagacacaacttactgagataccaacttgggcagctaagggaatgcttgcagcacccctccctcaaccccaggcagtgcaacttacatctccaaaagagacttcttcctttcgcttaaggagaagagagggaaaagtaaagaggactttgtcttgcatcttggataccagctcagccacagtaggatagggcaccagtcagagtcatgaggcccccatttcaggcactagttcccagacatttctagacacaccatgggccacaaggggaacctactgtattgaagggaaggatccagtcctagctggacccatcacctaaagagcccttgggccctgaataaccaccagcgatacccagctactattctgtgggccttaagcaagactctaagatgcactggcttcaagtgagactcagcaatctcagttgtggaggctacagtgagcgacttcatctggttgagaaaagcagaggggaaagtaaaagggcctttgtcttacaccttaggtaccagctcagccccagtaaggtagagcaataagtaggccattgaggttcctgattctaggccttgctcttgtgtagcatttctggacctgccctgggccagagggcagcccattgccccaaaggataagccccaggcctggcagcattcacgcaagtggactgaagagcccttgggccttaagtgaacatcagcggtagcctgtttgatgtccctgtgggcctatggtggtggtggccacagggtgagcctcctctgcctgtggaaaggggagggaagagtaggaaggtgtatcatggtttcagggccagctcaaccacactagaatagaaaaccacgtagacttccaagtttttttattccagtccttagctatcagatggcatctctgggccttggggtaactcactgcagtgaagcaaaggatacaagcctggctaactttgccacctgctgcttttagagcccaagggccttaagaaaacaaaggcagtagctaggcagtggttacagcaggtcttgagcaagacccagtgttgtactggctttaggtctgacccagcactgtcctagtgttggtggccacagggttgtttgtgtccctctatcccaagccccaggtggctcagcacagagagagagactcccattgtttgggagaaagtaagggaagagaaaaagtctctgcctggtaatccagataattcttctgggtcttatccaagaccaccaaggtggtacctctatgggtgtgtaaaaaccacagcattactgggcttgggtgcccccagtgcagagctaatgcaggtggcattagatctagggcttagatcacaacaccgaggccctttcaaatacctggaaagccttcccaagaaggacaagtacaaacaagcccaaactatgaagactgcaataaattctgaactcttcatgcacagacacaagtgaacatcaactagcatcaagatcatccaggaaaatgtgacttcaccaaatgaacgaaataaagcaccagcgactaatcctggagaaacagagatatgtgacctttcagacagagaactgaaaattgctgttttgaggaaattaagaaatctgagataacacagaaaaggaattcagaattctgtcaggtacatttaacaaagaaattgaaataattaaaaacctcaagcagaaattctaaaattgaaaaatgtaattgacatactgaagaatgcatcagtctctttaatagcagaattgatcaagccgaagaaagaattagtgagcttgaagacaagctacttgaaaatacacagtcagaggaataaaattaaatacctagcaatgaacttgaccaaataagtgaaagatctctacaatgaaaggtatataacattgattcaagaaattgaagaagacacaaaaaatggaaatatatttcatgttttgaagaagacaccaaaaatggaaatatatttcatgttgatggattggaagaatcaatattgttaaaacatccatactacccaaagcaaactacagattcaatgcaattcctatcaaaataccaatgacattcttcacagaaatataaaacataaccttaaaatgtatacagaatcacaaaagacccagaatagctaaaactatagagcaaaaagaacaaaactcaaggaattacaatacctgacttcaaattatactacagagctatagtaaccaaaataacgtggtactggcataaagaccaacacattgaccagtggaacagaacagagaacccagaatatagccatacatctatagttaactcaattttgacaaaggtgccaagaacatacatttgggaaaggacagtctcttcaataaatgatgctgggaaaactggatatgcatatgctgggaaaactggatatgcagaagaaagaaactagaccactatgtcatcatatagaaaaatcaaattaaaatgggttaaagacttaaatctaagacctcaaactatgaaaccactaaaagaaaacattagagaaactcttcaggacattggagtgggcagatttcttgagtaacatcccacaagcacaggcaatgaaagtgaaaatggacaaatgggatcacatcaagttaaaaatcttctgcacagcaaaggaaacaattagcaaagtgaagagacaacccacagaatgggagaaaatatttgcaaactacccatctaacaagagattaataaccagaatatgtaaggagctcaaacaactcaataggaaaaaaaaaaatctaataatctgattttaaaatggacaaaaggtctgagtagatatttctcacaagaagagaaatggcaaacaggtatatgaaaaaatgcttaatatctttgatcatcagagaaatgcaaatcaaaagtacaatacaatagcatctcacctcagttaaaatggcttttatcccaagagacaggtaataataaatactggagaaaatctggagcaaagggaacccttgtacattgttggtgggaatgtaaattagtacaaccaatatggggaatagtttgtaggttcctcagaaaactaaaaatagagctaccatacaacccagcaatcctactcttaagtatatgtccaaaagaagggaagtaagtatatggaagagatacctgcactcccatgtttattgtagtacccttcacaatagccaagatttggaagaaacctaagtgtccatcaacagacaaatgaataaagaaaatgtggtacatatacacaatggggtactattcagccataaaaagaatgagatcctgtcatttgcgataagatggatggacctggaaatcattaggttaactgaaacaagccaggcacagaaagacaaacttccttctttttctcttgttctctctttctctttttcccttcccttcctttttctttccttctgtctctgtctctctctctttctctatctttctctctttctctctccctttctctctttcctttttcttgctgcttttatgctaagggctggcattctgattgctcttttttcaggtttaatccttattttaataaagttttcaagcaaaaaaaaaaacaaagtaaggcaaatttcccacgttctcacttgtggaaactaaaatgtaaaaaattgaattcatggagatagacagcagaagggtggttactagacactgggaatggtagtagggtggtcatggcgaagtggggatggttaatgggtacaaaaaagagaaagaatgaataagacctagtatttgctggcacaacaggatgactatagtaaaaaataatttaattgtacatttaaaaataactaagagtataattatatataatatatactgtgtacccacaattaaaaataaaaaattaataaaaaagaaaccaccacacaaaaaatactaaaaaaatgaattcttaatattttcacttgatatgctaaattgggtcacaggatttacttttgtgacatcaattaacattacttagcactccttatgtgtttattcaaaatatagcagacatttgccattctctggggatatatttaaagttctggtaaatcagaaatccttgaaaaataatagactcaatattattttctaaagagtgagtggatgaactctaggtagaataataacattgagtattaatatggtggtgggaggtacagaaagtttgcaaaaaacattgagttacccattttgattggaacatggagtcaattacagtggtagaggtggatgaacctgggaaactggagccctagtgttgaagatcttacaggactgtcagaaagaaattttgaattgcccacatctaacaatgatttagaatgaaattttgacttgatattttaatgtatttctcttccctaacatgcttcagtattcaatatcctttatgataaacaacctgggaggtagaaacagtattttccacacgatggacattcctgtgcaggaattggaatgcacattgaaagacctactgagagttttatcaggaggagagctttctgtgatagacagtcatttggaatccattttccttcatttgggagtagttcccaggccaaatcactgttctatttatatccatgacctccttttcaacactgtaccagctgagcactgtgtagagtcatccttaaaagcagccgtatttgggtcaaaaatgtcaaccaaaatgagtgtaattagacaaaaatttttttttaaagaaagaatgaagaggctgttttgtttttgttttgtttttgtttttgtttgtagccttgtcagtaaatccttaaacctgtttccatttgaattgctaaatcattatgtacaatgagcttgggtgtgtttaattgagctcaacaaactttctttggatcattgaatgcctactgtgccagattctcagcatgtgtggtgtgtacgtgtgtgcatgtgcacatttggactggttgttgtagtctgcactttcaacaaacaaggaaatatctggaaaagtttattaccctatggatggagtggagaacagagaaggagtacatgggaatagctggggtcaggttagaagtgcttttctcctttctgaaagccactgctctttaaaaaaaaaaaaaggtggatatcggggtgaatattgtactatttttaactcacttcatatacagaagtcttcagactttgggaatcatttaaaacaactgaagcttgtgaatgcagatagctggcccttatatccatattttgattcagtaaatccaagtggagcctgggaatctaatttttaacaaataccttctgggtgattcttatgcaggttgtcctgaattttgcaattgaaaacttgcttaagggccacttctgacccctaagtgtagaaattgaatgcaatttaaagcatttaatagaactcttatgggcatcctgatactgtactcaggtccagggatataaagttaagtaaatatctagtaggcggagaggagtataaacatacacacacacattaacatgatacatactgtgagagtgatagaaatttgtccatcaggtatggttgtaagaaagttacagatacccccttgccaaacaaaaagaaagaaaattacagatccagaaatcaggaaagaaaagttgaaaatcctgagggctgagtgctgagatagactttgcctagtttgcagctttgtttgggatgtgccctgaaaaagtcgtatactcagtgaagtggaaacggtttttctctttgcatcttctcctttaaaagtaatatgtgcatccatgaggctttcaggggcctttagaaagagtaaataagcctagtttcaatccatcgtctccgttagggtctctgagaatcagactgtgaatttaaagctgtactggagaaaaaagctacccacatctaaaaatgatggtgggcattaagagatgagatgaccttttattttcctgagcctatgcaaggagtgggtacctatgtacacagattcttctctctgaagtgcctgtgtaggttaatgacaatgccagctgaggactttcagttcttcatatgacagattaatgcccatagaaagttagaggtattatgaggttactttaatgactctttatcacaccttagttctgtagatattacccatgacttcacatggaggacaagtacggagctccagcctctgcaacattaatctcattaatatacaaaaattattgctagaatattaatctttcgcatcataaaataagatcctataatgcagatcttcatattgaatgactacaaggttacttacagaaactaaaaaaaatcttaataactttcctttttggtaatcacatttatggggaaggataaaattaaaatgtggaggtagaatcacaatataatgtctgattaaaatgcttatgcttatgcccagatgccaaagaggtagaggctgcttctttgttccctatgggaggtggagcccctttttcctcagttttgtttatctcttgttctggtcccagcaactgggaccaggggcactccctcctctagagctagggagaccgaggtatggcaattttcaggctaccccaccctgccagtcatcacctgtgatgacttagttttctactggcaccactagtcttggtgagcatcctgctttcaggaaggagtgccctcttaacccccataaatactgggagaataacctacagggttgtggctggcaccgggactcaggcaatagctggtatgttgagttggctaaaaaagtgacaactgaggagtgtgccattttctcaataacagcaggaaaggggaggaaagcagcggaggtggtgggtgaaaagaaggtggagagatgctggtggaggaagaaatgtaggttgaagaagagttgatgaagtgatatccatgtagagaagagaggaaatgatgaaggaaaataaagtgacagagatgaaggaggaggcaaagccctggcctctgaatgccacggactttctgaaggctggagctggagacagtacctgcacaggctaacaggggcttcctccagctggagcccaagtttgggtggatatggtgacactgagatgagaccacagattcatcaaacaaaaaatatcccttctgggatgccaccttttgaaaccacccccacccaaggtcatgcgtaggggccaaggtgcagatttgctgagggccatctcaattaagaggtaaagagttcagacatctaacgacatgctacatgttcaaaatctttttttgaacaaacctctacttcagaaacaaggtaatcattaaacaatatggggttagatcctctggacaagtgggatttcctttcattccagtcacatggcaaggatcccatgccccagtcctgtaggagcaggatatcacctataggttcttcatctggtcctcagactgtagccttccagaacctgataagattgctgttatttttaaagggatctctagcccaactcctgaaataccaactgtcatgtggagggaaagccaggttaccttcagcagggcagcccatggagatactcaggctgttctggtatcagtgtagccaactcctacttttggaagttgcccctgctccagatcatctgccatctattgttggacctgtgcttggccaacagtgatgtctatgtgctgacctccttgcatcttggcttctccggacttttagtgctcccagcttcaagaatgtggcttttatgaacatgcccatcactttgtctaagccaggaaaatggtgaaaactgcattctttcatctacatggcttgaacccttgtctgtgtcagggccttcctgtctctctttgatgtaggtctttatgagttatcttcaaagagggtcagtgtatctttaagaaccgcaacctcaggaacaacgaaaggctgggttcaaggctggtggcaagctggttatcttcgagtatgtcccatgggcgttccatggacctaatacctttgcttgaccacaatcacgtagattttcatctttggttaagagttcacttcagccaccctactgagtatctggcaacacagggacataaacagtggcaagttgctgtgtatgtctgaagtgaaggataaaaagtagagggcctcttaatgtacccaagaccatagtttttcctgctcttctgttactagtaagtatccatgaaagtctgggctatggttttgtgtgtgtgtgtttgtgtttcctggccaaccttttggatattcttgtgcagaccgccattgacctcattgttcagtttctagtcaccaaagacttccacaactgcttatggactcagactcttggccaaccattggagaagccctctactatgccccatcctccctgtcacccaggaaccacaacaaatgtcagctgattgggctggcaggtgtggcccagttctctcagcaagggaaatatggcatcctttctaagaaccaagcattcttggtgacagccaataagcccatgaagaatatgggacatttaccagtcccctttcacccacctgagcatgatgaggtgtccaggtgctctgtgagatactaagagagaaaagaaagcatttctcatctttaaagtttatctatatctgtctgcctacatcttattccaatatctcttctctctctgtctctttttaaggcaccagagcaccctagaacacaaaacggctggaaagcagactttctaatttgctgcttctcttgattgtgtcctgggaagattgttcagtaatgtagactctgaacctctgctcttatgccccatagaaaattcaaagaggcacagacctaggactgtcagattgaaggactgaggtggtcaccagtcccatggaacagggatggttaattgcctaattgtgtacattgttctttttggctaatcttatcctcaatactgaccccctcaccccgacttctttcttccatctgtgcccaaatatccaagaagttcccagatatttcttaagtattagcctagagggcaaggagaaaaatgttatgggaatgaaatttaattaggagctaaaagaaattcttttaaatgatctaaaactaaaataaacaaacaaggtaaatgggatgggcgtggtggcttatgcctgtaatcccagcactttgggaggctgaggtgcacaaatctcttgagcccaggagttcgagactagcctgggcaacatggtgaaaccctgtctctacaaaaattaaaaaaaaaaaaaaggcaggcatggtgacatgcgcctgtagtcccagctacaagggaggctgaggtgggaggattgcttgaacccgggatggaggggttgcagagagcccacatcatgccaccgtactccagtctaagtaggcagagtgagaccctgtcttaaaaaaacaaaaaaacaaggtgaatgcatagctctaatatatttatttacaccacctttatttctggaataatgtaaagattttgattctgaagttttgagaaaagataaactgagataggcaaattcttcaaagttttataaaagcagctatagtaatatgtaagggagcagttgtatgtatttttagtacttaagcctcctcttctatgttcagaaaataatgtaagttttttcagacatttgcataagcattatcttttccccatctccatgcttagtttagccatctttattcttacccagtgccattcacgaacaggtgggagatggtgaaaataaatgaaatgcactattttaaactgtgtctgttgtatttaaactatataaaaacactgaggcaattataaaggaattcagaacaaagtcaacttttagacagtttttctttttttttttttttttttttgtagtctgtttaccatgtccacttgtttcattttggtttagctcaaggaaataaactcaggagcaatggaattgatacatgacactttcacttttcctgctcctcatgaagcaaaacccactaattactttgaaggaatccactaacacttccacatatatttaattttgctaaacttgtatagagctgccttagaggaagagagaagagagaaaaatggagcattcctggaaagctgcattaagactgttgtgtttctgccaatattcttaaggtgccgaatatatctggaaagaaaaaaaatcacaaagatatattacatacactttacttaatgtatatgccaattacttaaactttccagacattttgatattagagaatgtgtgattatttattcattcatgcagtacacaaggtagtttggcatttcccattctctatacattaagcatagccatgtaacttgctctggtcaatgaatcatgaaaagaagatatatatgtcacatctgggaggaagctttaagagctcctgtacaattgggtcagaacctcttttcctttgctgtggcgactagttcccgacgtggaggttctgttagcattgttcctggagtgaagagatgtggcacagtttctcccctccaccccaatcccttaatccaaatggatatgtagaatgaatgagaaatacactgttgctaatttagtgcattaagatttggaggttaaattgttactgtatcataatctaacccagcctatgaaaacattttttaggtttctgtatgttggatatttatgaataattgtgagaatttcatttcctaatatgtgtcactgtttttttgatgtctgtgtcttccctacctctttggtcctattgtttctaatatttggaaactaaatatatatatttagtttacacacctatggagagaaagagagaaaggtctcgttctcgctttgtcacccagtctggagtgcagtggtgaaatcatagcccactgcagccttgatctcctgggctctagcaattccaagtagctgggactataggtaaggtccaccttacctggataatttttatttttgtaaagattgaggtctcactgttgcccaggctggtcttgaactcctggactcaagcagtcctcctgccttggtctcccaaaatgttgggattccaggtgtcagccaccacgcctagtcttaaagttttatacaatcatgtacggattgtaatatgaatttgtcatatttacattgtgcccacatttattttctacttcattcatttatgtatcagttggtaacatattggtctaacttttctatgcaattagagtacatactcctaaggagaaaatgcaacatataactaactaatctccatgtattcttgtgcaaattctagtcatacatatttaatggaattcaatgcatttttttttctgaaaagataattgagatgctgatgaggatgatgatggtgatagacatttcaggaagtgattgtgctctaggaacttggatgttcagagctactgcaaagcattttgatttgtgcaggcaatttactgactatatgttctgatatctgactaccagaaataagttttgaagtacacagctaatagcatcatagatagattttcaaagtgtatacaaatatgaacgggtgggataatgtgaagattagcaaagaacattgtcttattaggggtaaaatggtaaataggcacattttagatgtttattctttgatgggtgtcttcctcagtgagaattatttccaggaagtatattttagtctttggaataaaacttttgccaactcatattgcattgtctttctattcttatagtataattttattttcatttttctggcatcagaaaacaggtcttaaagtgaaatttttgaatataatgatagatctgggggtatttgaatcagttttaatgcatatttcctgatgatcaagtgataagttttgcactgttggtctcatgagcttcttaagtgttctcataatattccctaaattagtgctcatataatttcatgcagtatatctttttaatattgtagtgttggaatgcttttacatggaaatttaatttttgatattaaaaataacagaatattttataataattcttggtatatttatgctggaagcatctccatcactgacgcatatttttcctatacagatctacatagcacacagatctagatggcgctcataaaatgaatggtgaaaataagcaaacagtgaaaattacttattgtgattatggttagcatggttgattgacttattcatttagcaaatattcaataaatatgagatatttaataaatagctatattatagacattatgctaagctctgtgaatacagagatgaaaaaaacatagtcccatttcttttttttttgagatgatggagtctcgctgtgttgcccaggctggagtgcagtggcgtgatctccgctcactgcaagctccgcctcccaggttcacaccattctcctacctcagtctcccgagtagctgggactacaggtgcccgccatcatgcccggctaattctttttgtacttttagtagagatggggtttcaccgtgttagccaggatggtcttgatctcctgaacatagtcccatttcttaaaagctcacatcgtagccagggatatgtattgactttatatagatacatattgattatagcttgtgctgaacgttaaagcagaaagatgtggaagtgctgtggaaacagaataaagaaaggattagttctttgagaaattatttgataaaaactaaaggaaggaacatggagcacatcacagaaaaagtgacactggaattgtgcatttagtacaatttttcatcacttcagcctaattaataatattaaaactattgaggattttattaggttggtgcaaaagtaattgcagtttttgccattaataccaccatctctattgtggataattagagagcttttctctaaagtaatagaacttttattccatgttctatgctttggaaatttgggagttttaacctggggtaaatatttaaaatatttattaacagcaatggacattcagaatggatgtgacaatagaattagaagagggtctggaaagacccctacggtagctgttaactctcaattatatggttatggatgggcctctgcacctcaatttttcatctttcaaatgtcactaatacttgtttcttcctttttttaaaaattatactttaggttctggggtacatgtgcagaacatgcaggttttgttacataggtatacacgtaccatggtggtttgctgcacccatcaacctgtcatctacattagatattctcctaatgctatcccacccctagccccccaccccccgacaggccccagcatgtgatgtccctgtccctgtgtccacatgttctcattgttcaactcctacttatgagtgagaacatgcagtgtttggttttccgttcctgtgttagtttgctgagaacaatggcttccagcttcaaccatgtccctgcaaaagacatgaactcatcctttttcatggctgcatagtattccatggtgtatatgtgccacttttttttttttttttttttgagaccaagtctcactctgtcaccaggctggagcgcagtggtgcaatctcggctcactgcaacctccgcctactgggttcaagcgattctcctgcctcagcctccctactagctgggaccacaggcacgcaccaccgtgcccagttaatttttgtattttcagtagagatggggttttaccatgttggaggatggtctcgatatgctgacctcgtgatccgctgcctcaacctcccaaagtgctggggctacaggagtgagccactgcacctggcccaatacttgtttctttcatgtaggatatttgtgaagataaaatgagacaatgtacataaagtggttgacgcaatggtatggggtatgaatatttaagaaacattaggcgttacaatttttaagagtaagaaagaacagacctgacgaaaaattacagatatatctaaaagtgtggaacaattttcttcaggtggaaaaactgggaaaaaaatgctttccaaaggaatacttgaaagttggaaggagatgaagggatggctctggaaaaggcgattatttggaaattatctaggcaaaatactgacagtcctgttttcgtgggggataattattttatattatagttgttcctaatttcaatgatcatctctagtgataatgttaatgaacaaccctggagtgagatgtcagtatttgactgtggctgtttgcaaactctgctgtgattataaacagtagtctaattgcttaatttattgatgttttgccgacatgtttttcagcaacatttgtgattgcagataactaatcatttctctttgggctcattatcatacgtttgcatttgatttgtctgattgctgcaggtggaaacaataggtgatgcctactgtgttgcagcagggctccacagaaaaagcctctgccatgctaaacccattgctctgatggccttgaagatgatggaactttcagaagaggtgctgacacctgatggaagaccgattcaggtaaccctcccaacaatctagtttgagtagtaagtgcaccattaactggaggaggcaaataattcccttccaagttctactttttgtaatttatagatctagacaagttgggtgcttaaggaggacaaggagtgactagagataactcataaatccaggaaaagaacaaatggaataggtccaagataggaaatggtttgtggaaggcaaattactgtggaggaaagaaagagctaaaagattagacccaagggaagaacttactgtcagtgaccaggtcacgaaatccaagcaagaatgatgatgatgagattcggagttttagaggtaatccaagaagtaaaacacaaaaaaagcaagaaaatggaggacctgcgcaacttcctgtagatagtatacaggtattccttgtgaaacatcagacctcagagttacttctggagtttttcttgtggcagagtttgaagattgcagcctgtgaaaactttaaaaacagtggaaagtccagatcctggtgtgttgtactcttgggtctgatggtcttctgcaatctgaggtctacctctgggaatgaagaatgaatgaggtcatctaccatatttctgcttgagcccagtgatggatcccagaagtgtcattactttgaaatcagaaatcttatatttggggaagtaaacttgtattcaagtccacccttttataacagcttaccagctaagagttaagaaaacacgggggcgggggggcgggcacaggaaatggctaaaaatatgagtaccgttctagttctggcattatagcagattggggacactgaacaatccatctgattaaaattatgaaaatattgggttaaatatattaaaaaatatttttaaaaaactattaggcacttctctgagctcacaggaacaggaaaaacatgacaattacactacgtgtgtagattgaaaaaaaaaaacgtaattggtgaatttaacttaagagccctgttattagcaatgatagaaggaaactgggaaatactattcccccctggaggatgccaacttcaatcctatcctcaaattatttccacagattccatgtgttgtaaaaataaggtcctagtttgtggttgtatttttatcttttagttgttcttgataaaccagaaggtttaattttaatgttttaaatgatacatattttcttttataatttgtaaatttttgacctgaccagttcacaaaaaattcttcctgacttaagtcagaatttcctaatgataaatttgcagtttcatagtatgggtttttacatttaacccacctggaagataaaggttattaaaacgagtaataaaaaagaaaaaagccacacacacatgaaaacaaagtactatggggaagaaccgggggaaattatagatgtgaaaaaacatacctgggatgttttcagatatcaaacttatcagacacagaattaaaatgacaatttttaacgtaactataagaaataaaaagagctgaaaactgtgagaaagggacaagacttgggaaagaatcagagaacttctaagcaatcaacacgatgcttaagaaaagaagagagaacaaagtggacaagtttaaaagcagattagacatagatgaagcaagagcttgttcactaaaagaactgaagaaattatcaataactaagttcagatatttaaaaatggggaatatgaataagagaatgtaaaatataaaatatgtgggagacagggcggagagagtggaaagatgtaatatatattcaattgaggttccaaatgaaggtaacagagtgaatacaaaaaagagaattattttcaggaactattaaaagatgtcaatcagtacccagacacagtaatcagcacccagacacagtaattccaaagaattctgcaaaagttaaaccataggaatccaaaactaaacccatcttaacgagactgcagggcatcagagaaaaagagcaattgataaattataaaagtgacagcctgggcacggtggcttacgtctgtaatcccagcacttagggaggctgagagggtggatcacaaggtcaggagttcaagaccagtttggccaagatggtgaaaccctgtctgtactaaaaatacaaaaaattagccaggtgtggtggcgggcgtctgtaatcccagctactcaggaggctgaggcagagaatggcgtgaacccgggaggcagaggttgccgtgaaccgagatgcgccactgcactccagcctgggtgacagagcgagactccatctcaaaaaaaaaaaattataaaagtgacattgattggtgtgaaaaggacaaggcattcaataaatgcttgggggactcttggctattcatgaagaaaactaattgaaattggtattgtactttatgaatctttatataaatcaatttttggtgtgggaggtaaatgtaaaaattcatattataaaactataaatttgtcattagaaaattttgacaagtagggaaggattttttgtgaacttatcaggtcaaaaatttgcaaatcataaaataaaagtttagaacattaaaattaaaaccttcctgttaagaagaactaaaaaattaaaatacaactacaaattaggagaatatttttgtgacacatgtaatcaataagtatctagttaaccttgtcagtaatcaaattaatagaaatttacaacactatcataagcatttctccctactagtttgacacaactttgaaagtctgacagtgccactgttggtgaggatctgtagcagcaggaaatctcacccatagctagtggaagtataaatggtacaatttacttggcatcacctggtaaagtttaacttttgcatgtcctacaacccagcatttcctctcctagacgtttacacatgtacaagggaagtacttgtgcacgtgtagcaaaagtcacacacaagaatagtttttgtaacagtctcaaactctagctaattcaaatatccatcaacagtaggatagataaactgtgttatatttataccttggtataccatatagttgggaatatgaaagacctcagctactgacatcaacatggatgaatgtcaaaaacataatcttgaacaaaagaatcaagtcattaaagaatgctgtagtattattccacttaactaaagtttaaaactggaaaaatggaaacaattctatttagaaatacttgcattgatggcaaaaagtgtaaaaaataaaaggaatgattaacacaaaattcaagctggtgcttatctctgagggaaagatatgggaagtaagaggatacaatagggaagataaacatagtataaaattttttattttattactcttctttaatatgcacatatatgtttatatttaaccatttataagtggaaagagagttttctaaccactcctaccagtgatgaaaatgggaaaatatggagcattaaaaataaaatctagtttaagttccctcagggaataattattgaatggtacttctaccatgccaggaaaacaaacaaaaggaatactgtctcacatttgctgcacactgcaaatatagacattccagattgaactaatcagttcttaaattttcaagcctaccagctgggcaggcttctcatttgggattgtttttgatgttggattttcttttatggagagtatgtttgtattgaatttagcattgtcatagcacagttaaattacccgagaacaaaaccagggaattgtgttttacagtgtgttcatcaatattttcatttgtgggatttaatattagctctttcttatgaatcagatagtcttattaaatcagaagaggaaatatccataaagatttaataagaatgcagaaagagaattcaaaataataaaccaccttagtaattttagcttccttactaatttatagtatttgcatgatttgggattatttttcatcatattaatttgattttaaattgccttctagcttggtgctgtgggaacatttccaaacttattgagagaatcttttattatgaaactgctggggtgttgtagtagagttgatatgtgatagcttactgtttacctcaaattatgtaagtttttaggtgatttaaattacaagttattataatagcaataattgactaaaactgaatccaaactttgaaaagtaaattgataatttgtatatggatttatgaacctttgaggcatcctgtaatgatgggaaataggagccaaaattgtcatatacaattgcttggaaatgattggtaatgcccttgactcactaattgtaaaactgcctgcatttatttttttttaattttgaaaataaccagagaatgtagcattttgttttttcagcctataaatactcaagtaaattattgttcaataagtactctaatgaaactcagaggctacttctggactatatctataaagcattcataaatatggtctatctatacaatacattctgaaaaatcagttcatgttgactttaattagaactgcttttataaaaagtgagtagaactttttcaccctggatcaatatgatatttcttctgctggctgaaaatatggaagaacagcattatgactgtttcctttttattcttcccaagggagaatctgattttcttgttttttttcctcaagacacagggtcttgctctgttgtccaggctggagtgcagtgtcaccatcacagcttactacagcctcaacctcctgtgctcaggggatcctcccaactcagtctctggagtagctgggaccacaaacatgtggaaccacacctgactatttaaaaaaaactttttagtagagatgggggtctctctatgttgcccaagctggtcgtgaactcctggcctcaagcaatcctcctgcctcagcctcccaaaatgttgggattacaggcatgagccaccatgccaggactgaatttttaaattttaaacagtagacaattgaaaagtaaaattatatttgtattctctcttccttgtttgcactagctatattgtgaattcaccagagaaatgtattactttagttctctaatcttgtgaacccaaaggtattttgaatagtttttagtgctgactggctaacttacactaatagtttaaccacactttgattaaaataaccaaatatttattactgcctatgacttattctttctttaaaaaacactgttgatagggaaagggaagttgggtcaaggattaactagagaatgtacctagggtatatgagaaagacaaatagcattttcacgatttaaggcttttgaagaatattgagtatgtccaaatgtcttttaattctgtacttagtttaaaaactattttcattaaattttatctcataggcatacaaattcaaattttcttcattagttcaaagacagtgcattttatataatgaggcaagtatgcaggaaacattgtgaactagagttaaacaatgtgtaatcatgttgtaatactaatgtgtttagcaatctcaattgcaaatcagggaaatgctatgagaaaaagactcacagcattccctgatttgcaattgagattgctaaacacattagtattactgcctggtgcaaaagcaggaatattaatgtgcaatttacatgtattgtaacacattaaattacagctccttaagcttcaacttttaatgagcttacaggattttttgagattatgcaataattgttctctaattaatttttaatttttagcttcaacttttaatgagcttacaggattttttgagattatgcaataattattctctaataatttttaatttttaaatagtttttgctatttccagaggaaacctgatgttgttattttaatatttggagggatttgggttttggaaatattgcaatatttaattaaccctatcagatttcagcctgagactgtatttagaaaaaagaaaaactaattacagttggcactccatatccatgagttctgcatcctccgattcagccaactgtgggtcaaaaatgtaggtaggccaatgatagttgcttcagtattgaacatgtatagacatttttttcttgtcattctctaaataatacagcctaacaactatttactcattatttacaacacgttacatattataagtaatctacaggggatttaaagatttaaagaatgtggtaggatgtccataggttgtatgcatgtacaacactacttaatataagggctgcaagtctcttatattacttataatacctaacaaaaagtaaatgctatataaatcattgtaatactatatcattttgtttgtagtttttaattgttgaattgttatttttgtttgttatattttttttattttttaatgccatattttcaatccacggttggttgaacatgcagatgtgaaacctgtggatacacagggtcgactgtatttggtaacctaattaattttctaagattctttgataattatttatttataaaactcaagttagtactttttaatcacattgagattaaaaacatataaggagaaaaacctaaggggtcagaaaaaactacataggcattatataaaattactgttaagatactgatcccagttatcctcatttctcacatttatcaattaggagtatttaaatttgcttttaatctcctagataatgcatatagtggcagttttcataagtcagtgttctattgtaacagtaatatggaaaaataccgtataatgttactggtgaaacttaggactagatagatatattttccgatagatttatcattttgaatagtaaatttatttgtaactataaatgtgtttgtttttaaaaagtatttatttaaagtattaatatttgtgagtgtaccagcaaagttatgagtctcttctgtagtttgcttccttttaataatcaatgcctcattctacatactctccttagatctattttccaacttgccaatacttccctcagttggttgtaaaaattattgattaaactcatccacttgatgcttaaatgctgattataccagtttatagtgttttgcagttccatttgtctgacaaaatttttcataccgtttttatttattttcttgaataaatcatctgtaatgattgtaaatgcttctcctggtaagtcagtctccagaactcctgcagtctattacatcatttgttctttcacttaattttcagtcatgttacttgtttcctgtgtgactaattacacttttttttgtttgaatgctggagattgtatataaaatattatagaaataatttaagacttaggatgattttgcagggaaattttagtgtgcttcttgaaagagactaggggctctagcagttagcgatcaggggatttaaagctgggttttggtctctgtgaggacctgtctacttctggttcacctctatgttttggtattacccttatacctgtggtcatgttcccatctcaaagtggggagggctttctaaggtctttgccctaggaattcttaggctccagtttatgttctcttggccctggctgtcaaaaatgctgctcagcttctcaacctttccattaccttttctggagccagaagatgcccacaggataaaagcaccaccaagtttacttttcacttctcaggtttatcttctgccatatcttggtacaataatttttcgttactttgttagctgaccagcatagggtaattcaaatgatataacctgctattttatatgtatatatgctaagtttcacaataattctgtgaaggaattattgctattatttccagtttgtaaatgaagaaaataagcataaaaaatagttaaccagagcttctaatatatatactgtgtatacattaaataaaagcatgttaaataacatttatattgtcaaatcttcctattgccttgaatattccattaaagttagacttttcatggctttagtcttcaataaatttaaatgtatgttagatgtcctctttgaaaaagtagaagtaagttctctattttaaaggtattccatccaaaaataaaataatttgtttttaaattagaaagtaagagacattctagctgcatgtggtggtaggggggcatacctgtagtcccagatactcgagaagctgaggagggaggatggctttaatccaggagttagacaccagcctgtgctggacagcataacaataccttatctagaaagagagagagagattgacattgattaaattcagttatgtgaaaaaaatgagtgttattctatcaatcattttgtaaactgcaatcactggccagattgggtgggggatgtattagtcatgatgctctgctttttttctatattttccccttgtttattgtttgttgtggattgtaatgcagaagctacatatttaaacgttttatatttacattatttcatagggtagtcattgaatttaaagattaggtcatattctatttaattatttttatttattgagcacatttgttttaagcatagaattactcttctggcatgatgctatagtgctgaactttaatacacaaatttatttatagacagatctacttactgagcacattatttgttttaattatagaattactcttctgacatgatgctatagtgctgaacttcaatagacagagcatccttaataccttacaattcctctgtaagatatcagcataatgatttaaaacacaatattgtgtctgtgatgtgtatgtcaatgagacagaattccactgctagtttattttagcttttatctgtaatcatgaaagattccaattttatataatcacagaattttaatcatattttcagactataaaatagtctatcaggcatacatttctaaaaatgctagtcttactgaaaagttttattatgatatttgtcaaacagatttcccaagcagtccttttgtgaagatatttgcatatttatgctacaagaaagaatagttaataagttagtgaaagaaaaaacaaaaccaagtgatgggaaaaaaagctaaactgattcacatgaaactgtgcatgcaaagcacaaaattgcttagtttgattttgtgcaacagtcttgactttcacatttttggaagaaaaatacattctttagtggagacatggtttgagtattttgttagttaaatattatcatcactatgaggataactacctttaaataagttataatctatttcatgtattttattcctgcctcttgtctccagtgtcccactaagactactgatacaatgtccatagaagaggctaaaagttatattagcaaagtcactcatttttatttgatttttgtgtggtgtgctttagaagtgtgagacttccaagcagttaggaagctcgtgtttttatttatctgacgtttatgtaaagaataggaatctccatctgccaatattttttccctggtagagacagtaaatgtgatttcatcaacccatttagtaggttagcccattatctttagcatatggtccctttcttaggtgtttttgaatgggtttttaatcttttactgacacttcagtctcttttaagcctatatgcatataggccaacatgagtagcctaactcttacaatatgaaaaatgatatgaaaatagcaagatacaacacataagacagtaatgtgctatctgcatgctaatcacactattgatttagttagttagttagcttttacgtttttgacctgttgttttgagatctcatatctcgtttcaaataaaagtttaaaaattatttaatctctttatttgttttctaaaattacaaaaaaaagatctctgaaaactagtattacagaagatagttaaaatcacctataatttaccaaccaattatagacatattttacatttttatgtatctttaaagtctttttatatgcaaacattcaatacaaacacatagaaatagaaggtatggacttaaaaagtagattattttaaaaactgaataagcttcattcaacttggtaatatcatgacacacagtgtaccaaagatgcagagaaatatgcagaaaaaacttggttagccctaggaagaatctttcattattattaactcactttggttttgtatttttctgttcctacaattgaatttttgagacactggaaggtaactctttaatcacctgagttgcaaatgtggtactaacaattcagtgtcacaagtgcttttcaaagtatgttaagctttttgttgatgtcatgtcaggcatatggtaattgtctgggtcaccactataatattccttatttggaatgtggtttcctagcaactcttgctttttcctaatggctgaattgatttctggacatttgtaatgcttcctactgcatcagaaattgtcaccttgtgtgtaaatgttacaagaccaaatttacatgtagattccattttaagaaattattttgctttatcacttgcctttaatgtgtttgttcagaggttaaaccaatcaatcataaaaaatgaatttagaaaacctcattaattcagactctttagggaaatatggtaattttgacaaattccaaaatatatgcaaatagttcttagtggggaacctcctgaagttgaagaaacagagtaattttgatggtcaaatgaccatgtaatcaggaggttgttagaaacacaggtccggagtatgcatggggtgtcccaggggagaaaaggcttactttggaggcttgctgtttcaactcacatgaagcctgattctacatgaatctggttggagccttgctggcagcgacttttactcatttattcaacaaatgttttttgaatgcttatgattttctaaacaattggttaggtattagaaatgtgagggtaagcaaaccaggtacatccctgatcctcccacgaattacagcctatggaaccaacaactagaaattactaacttggtgaggaaggagaaatagactcagttttctctcaatactctttccaccttaacatcgagaggtttgggttaggcttttaggaatataattctttgtagagcaaatattcaggatgtcatttacattcagacctacattattttggtgtttttgtagatttcatatgttcttagggaagtgaggttgaaaggcattaaaaaccaactatgtggtaggggttagcttgacatttacatattatctcacttaatctacacaacaactaagaagggcatatatgcaatttttatatacttaaaagataaaaaaagacattggggttaaaaatatgtacaagattatagaggaaaaaatgcatactggacactttccagatgtcagacttgtgccatgtctttatgcactatttattcctgccccccaacccccccccaaaaaaatctgcaaagtaagtttcgttaatcttattttacatttaaagaatttgagatttagaaagtttatataatttgatcaaggttatgtagctagccaattgcagaactaaatttgaatccagatatatctgtttggaaaaaagaaaaaagctttgctttttttcagtataggaaactggagaatgcccagagtagaattttattacctgagtacttaataacaagagttacttctcacctagtgcttactacgtgctcagcattatgccaagctagagtgcgtgagcactctctctcttacatgtcctctcccttcctaatatatatgcatatacacatacacctgtataattatttacatgtatgtgtatattttaggcatattttcatatttgtgaaatatgcctgtactgtatatacataattattacaacaatcatggaccatggattagatgttatctctatttataaatgggaaaaccaagactgaaaggttaagggactttttgtcaagagtaaataatattactaagtaagaattgattcggaattggaattcaaatctgtttgacttcaaagtccatgctcgtaaccattaccctatactgccactcacaatacaactggaatgtattaatatgatttctaatcttatgactaagctaataactttaattttccttaaaaaattattgctattccctgttccttaagaaagaagtgtgaagacgtaatagcagtgcaatgtcttgaaggcattctaactcaaggcaaactcacatcgagatgttgaaataatgaggacaattatgtcgacatttaacagaatgagttgaaaattgatagttctatagaatttcaaaatatctgaagaaaaaattaagttgggaataatattgaaatatacacttctgtaatattagctttttataaaaaatagaagaaatgaactttttgtagaaacataataatccaaaaactaggaaagcagaaatttaaaaccgtatcagagaatccaaaaggcatatttgcttttttggacatattatcttccagatggtatcagttgatccttttggatattgttatctaagattattttttatttacgtaacgaaaagcactgattgattgaaaaagaaaaatgtagtcaaatagtttgatcagtcagcctgcaagcctttactgaatttctctcatgtgcaaaaccacataattgagttgcagactgaactgcatgagtgccaaatactaatctgctttttttcttggctctcaagtcaaaattctgtatacacaatacccaaacatctggtcacttaaatccattcagtcaaaaattcaattgaccgcccagattttctgattctaggattccattcaacttgtttgccttaattagttagtttatctgaaagctatgtcaaataggtaatagcatatatttagttatttcaatagtacttggcatcttacatatgaaaaggtacagttatggagggaagaaaacacaggttctgttcctcccacctccatcaagcttttaacagatttaatgttgttttctgccttctatactgtttgccttcctttttgaattggtctcacccatctctcactgccccccactctcgggacccctcagtctccatttctctctcaatttcctaaaagtgacatcaattttccatgaattacctaagaacgacttaccaaaaaaaattacattgttatgaataatgtacgcaaaactgttgatactggctaacttaggggaaagagctttttccatttttaatcttacagttttatatctgttcacattttccaaatatacgtatgaattatttatgtattgccttttagtatccatagaaattatatgggagttgccatcacggaccatttttctttccttctttaaagtttcctatacttaaaataactcataaatataatttctaaagtaagcacaaattctcacttatatatttggttcacaggaataatcagcaggcaatgcctacaactgcacagaataaaaatttttattggctaaaaattagtgggagcatcaaatgtctttgacaaaattacactgtgaaacatttggccagcctaatgagggtttatagaaataatgaccataaaagaaaactatactggcagaaattaatatgagcaaactactgcttaatgagtcccaaatcatcactgtaaagtttcaatgggaaagaattcatgccaattaaaatattttcagagggacacaactggaaatgtaaaatattagaataaatgtaaaatattagaatcaatttatatgtagtatacagaaaatagatcaaggaattaaattgacttaatagcatttagtccagaaaataattttcttcataataattcttcagtattattatatttcattcaatctttgtactcctttgttggggtgcaaatgtcttgaactataactgttttattagcctaaggaattatttgatgaattaacagaagctgtatcatggttctagacattcatgctcaataaactgaattaaatgttaccaactggtaggagaaagtagagaactttatttagttgtggcagtgatagctattatatctttggatgattatagtttttatctctctgatcctttgctgcacaagtaagtattcttttatatttgcaactttttgccatgtcttttacctcacatataaataagtaaatacattgacttccaggtttttaataaacttatagtattctccatttcttttattgtgttttctcatctttctcttactctaaattgcatattcataatcttgtccttttgaaaaatactaaacttatcccatgctcatattttaccccagcactcaaaatacaaattagtaattttgctacccaaagtataatgaagtaaagtagacctgcctcattacaccagtgagaatacctattatgaggttatgattagtgatcacactgtgctctatgcagcgcagcatcctgtgctatattaaaatctcttcactagttgtgttactgtagcacactatatccaaacattgttctgtgttatttttctcttcattttaactgtagtttgtgaaaactcttactttgtggttaagaaggcctgtccagggaagcaagagtcataccatattttaaaaatatacagtttatcagagctctaagcataatgtatcagccacaaacaatcatggcaaagcttcccttttaaacttggtgcttcaagggttgtttatgccttcaaaaatttgctccaaaattactaattcctgttttacactgggaaagttattagtgtgttcaagtagattgatatttagatttaaaaattatctcaggcaaacatatttctatccatctctatggcaatgttttgatggccaatttatgccagattctagagccaaatgtatttgcctgaggtctccagatgttttctgacttgctgctggtgtctgaaaaaacgttgcaactatgactgtaaattcaccctttttgctttactgaactggggctaagacacccatccttcttttcttgtggtttagcttagccagaaatgcaccagagataatttacaaaaggataattatatagtagcttaggaaatttggttgtgaataactaacattttgtaagcttttaaaagttggaaatttgaagatcaactctcatttcatacatgataaaaagatatcaaaaaagtatttgattatacttaagttatctaactagttagcaataggatctgaacatgtgaaattcaccagggaagctaatgaagaagataaggccagaagaaggagaaataatattgtagtttttctttttctggcaattgttcatcatgatagaagaagtataatttggaaagtgtgttttgaggttattatatgaaagaggtggaaaattgcacaaatctgtggcagaaggtccaattatcttgacctcttgagtgtcatttctttattatcagagtattactatttttactgtttcctttttaatcttttaaaactattaattctttcctcagttcctgtcttccttctgtgagagcctctcattattcatatagaatttagccaaagttgacgtggatttttttctccttttaacctttagtattttctatggaaatgatgggccagttatttgttagcttgtaaaaggaggaaaaaacaataaatgtgtacctttatatccccacacctcttctgtattatctctcagaacatattaattttttgaaaataccagatctttaaaaatagtggtacatcttcaggaatatttattttttcatcatttcttctatttgttaccatcctcaagtatgtcaaaaaattagaataaaattattttacctactttgtccaaatatcaagttgtaaatactattcatgtattaaaaagtgaaaaactatgactgttataaaaaatatatgctcacataaacgatcgttttatgtatcattccttgaagttcggcccactttagaaattcacatatagccatgcctccaaactcatcatagcttagaattgttccaactacataatctcaactccaaatgtcttttcatagtcacattacttgttcttctgccactttctattctaccattctcactcatcactgtgatgtataagcctttatccattcttaggtttccagtctattttgagtatattagttttctgtgcctgacataacaaagaaccaacaaactaagtggcttagaacaacagaaatttgttgtctcactgttctggaggctagaatcccgagatcaacgtgttggccgttttatttgaagacatgttttatttgaagacactagggaaggagctgtccaggtctctctactattactagattctggtagttccttggcagcataaaatccaatctttacatggcattctccctgtgggcatggatgtatctgtgtccagatttctccttttcgtttttttgagacagagtttcgctcttgtcacctaggctggaatgctgtggcgcaatgtctgctcactgcaagcttcgcctcccaggttcaagcaattctcctgtctcagcctccccagtagctgggattacagacgcctgccccaacgactggctaatttttggtatttttagtagaaacagggtttcgccacgttgggcaggctggtctcgaactccttacctcaggtgatctgcccacctcggcctcccaaagtgctgggattacaggcatgagccatcacacctggccatttctcctttttataaggatactagtcatattggattggggggtcccccctactctggtaggaactcatattaataattttcaatttgactaattatatcagcaattaccctacttctaattaatgttaaattctgagatactgaggattaggaactcagtatatgaatttaagggggtagggcacaattccatccataataccttcttatctagaaaagaagaatcccattatctcctatctcaacatggctcctatcacccttctaattttattcttgtcttccatcatacagagctacctaagtagaaaattcttgctctggaattgatggacattactggtgaaaattacataatcatggtaataaaatacccattaagaatgcatatgttttgaactcaactgggccttaaatctgtagggatcttgtttcaccatcccctagctatgactgttgcaaatacttgcttttttttttttcaataatttcaacttttattttagattaaggggtacatgtgcatgtttgttacatgggtatgttgtgtgatgctgaggtttgggatacaaatgatcccatcatctaggtagtgagcatagtcactacatttgtttgacttttaactttgctactcttactccaaacagacccctcctttcctaactaaatgaaatgctagaagacatcaatatgaataaatttgacattctttccacacccctccccaacactattctttcttcaaatatcttctctgcctttcatctctcccctttgactggccccagtgtgtcaacaaaacctcctctgtaattaatgcaaaaatgtcattttctttgaaagcttccctctctaactatgctacatgctgctgctttgtttatgatcaaaaaataatggaaagccactctgttgactcttcattgcctaggaaataagaactaaatcctaatcagtaagtacctttaatgtgttctcaagctagttgttgaaacctatattctggtgagctttcaagatggccgaatagcaacagtggtggtctgcagctcccagtgagatcaatgcagaagatggatgatttctgcatttccaactgaggtacctggttcatctcattgagactggttggacagtgggtgcagcctatggagggcgaaccgaagcagggcagtgtgtggcgttgcttcacctgtgaagtgtaaggggtgggggatttccctttcctagccaagggaagccatgagagtctatactgggaggaatgatacactcctacccaaatactgcacttttcccactgtgttcgcaaccagcagaccaggagattccctccggtgcctggctcagtgggtcccacgcccacatagcccagcaagctaagatccatggacttgaaattctcactgctagtgcagcagtctgtgatcaacctggaatgctggagcttggtgtggggaggggcgtccatcactgctgaggcttgagtaggtggtattatgcccacagtgtaaacaaagctgccagtaagctcgaactgggtggagcccaccgcagctcagcaaggctgactgcctctctagattccacctctgtgggcagggcatatctgaacaaaaggcagcagtccagtcagggaattatagataaaaccctcatctccctgggacagagcacctggggaaaggggtagctgtgggcaaagcttctgcagacttaaacatccctgcctgacagctctaaagacagcagtggttctcccaacaccacattcgagctctgttaacagacagactgtctcctcaagtgggtccatgacccccatgtagcctaactgggagacatctcccagtaggggctgacagacacctcatacaggagagctctggctggcatctcatgggtgcccctctgggacaaagcttccagaggaacgatcagggagcaatatttgctgttctgcagcctccgctggtgatacccgggtaaacagggtctggagtggaccttcagcaaactccaatacacctgcagctgaggggcctgactgttagaaggaaaactaagaaacagagaggaatagcatcaacatcaacaaaacggacacccacaccaaaaccccatccatagtcaccaatatcaaagaccaaggtagataaatccacaaagacggggagaaaccaatgaaaaaaggttgaaaattccaaaaatcacaatgccttttctcctccagaggatcaaaacttcttgccagcaagggaacaaaactggatggagaatgagtttgatgacttgacagaagtaggtttcagaaggtgggtaataacaaacttctccgagctaaaggagcatgttctcacccaatgccaggaagctaaaaagccttggaaaaagatgagaggaatggctaactagaataagcagtttagagaagaatataaatgacctgatgcagctgaaaaacacagcacaagaacttcatgaagtatacacaagcttcaatagccaaatctatcaaacagaagaaaggatatcagtgattgaagatcaaattaatgaaataaagtgagaatacaagattagagaaaaaagagtaaaaagaaattaacaaagccttcaagaaatatgggactatgagaaaagaccaaatctacgtttgatcggtgtacttgaaagtgacagggagaatggaatccagttagaaaacactcttcaggatattatccaggagaaattctccaacctagcaaggcaggccaacattcaaattcaggaaatacagagaccaccacaaagatattcctcgagaagagcaaccccaagaaacataatcgtcagattcaccatggttgaaatgaaggaaaaaatgttagggacagctagagagaaaggtcgggttacccacaaagggaagctcatcagactaacagcagatctctcggcaaaaaccctaaaagccagaagagagtgggagctaatattcaacattcttaaagaaaagaattttcaacccagaatttcatatccagccaaactaagcttcataagtgaaggagaaataaaatcctttacagacaagcaaatgctgagagattttgtcaccaccaggcctgccttacaagagctcctgaaggaagcactaaacatggaaaggaacaatcagtaccagccactgcaaaaacacgccaattgtaaagaccatcaacactatgaagaaactgcagcaatgaacggacaaaacaaccagctagcatcatgaggacaaaatcaaattcacacataacagtattaaccttaaatgtaaaagtgctaaatgccccaattaaaagacacagactagcaaattggatgaagagtcaagacccatcagtgtgctgtattcaggagacccatctcatgtgcaaagacacacataggttcaaaataaagggatggaggaaaatctaccaagcaaatggaaagcaaagaaaagcaggggttgcaatcctagtctctgataaaacagacttcaaaccaacaaagatcaaaagagacaaagaaggccattacataatggtaaagggatcaatgcaactagaagagctaactatcctaaatatatatgcacccaatacaggagcacccagattcataaagcaagtccttagaaacctacaaggagacttagactcccacacattagtaatcggagaatttaacaccctaatgtcaacattagacagatcaaccagacagaaaattaacaaggatatccaggacttgaactctgctgtggaccgagtggacctaataggcatctatagaactctccaccccaaatcaacagaatacacattcttctcagcaccacattgcactgattccaaaattgaccacataactggaagtaaaacactcctcaggaaatgtgaaagaacagaaatcacaacaaactgtctctcaaaccacagtgtaatcaaattagaactcaggattaagaaactcactcaaaaccgcacaactacatggaaactgaacaacctgctcctgaatgactactgggtacataacgaaatgaaggcagaaataaagatgttctgtgaaaccaatgaagacaaagacacaatgtaccagaatcactgggacacatttaaagcagtgtgtagagggaaatttatagcactaaatacccacaagagaaagcaggaaagatctaaaatcgacaccctaacatcacaattaaaagaatagagaagtaagagcaaacaaattcaaaagctagcagaagacaagaaataactaagatgagagcagaattgaaggaggtagagacacaaaaaaaacccttcaaaaaaattatgaatccagaagctggttttttgaaaagatcaacaaaatagacagactgctagcaagactaataagaaaagagataagaatcaaatagacacaataaaaaatgatacaggggatatcaccaccgatcccacagaaatacagtctaccatcagagaatactataaacacccctttgcaaataaattagaaaatcaggaagaaactgataaattcctggacacatacactctcccaagactaaaccaggaagaagtcagatttcttaacagaccagtaacagtttctcaaattgaggcaataatagcctaccaaccaaaaaaagtccaggaccagacagattcacagccaaatttaccagaggacaaagaggagctggtaccattccttctgaaactattccaatcaatagaaaaagagggaatcctccctaactcattttatgaggccagcatcatcctgataccaaaacctggcagagacacaacaaaaaaagagaatgttaggccaatatccctgatgaacattgatgtgaaaatcctcaataaaatactggcaaaccaaatccagcagcacatcaaaaagcttatccaccatgatcaagtcagcttcatccctgggttgcaaggctggttcaacatatgcaatcaataaatgtaatccatcacaaaaacagaaccaaagacaaaaaccacatgattatctcaatagctgcagaaaagaccgtcgacgaaattcaacagcccttcatgctaaaaactcacaataaactaggtatcgatggaacatatctcaaaataataagagctatttatgacagacccacagccaatatcatactgaatgggcaaaaactggaagcattccctttgaaaactggcacaagacagggatgccctctctcaccactcctattcaatatagtattggaagctctggccagggcaatcaggcaagagaaagaaataaagagtaatcagttaggaagagaggaagtcaaattgtctctgtttgcagatgacatgattgtacatttagaaaaccccatcatctcagccccaaatctccttaagctgataagcaacttcagcaaagtctcaggatacaaaatcaatgtgcaaaaatcacaagcattcctatacaccaataatagacaaacagagagccaaatcatgagtgaactcccattcacaattgctgcaaagagaataaaatacctgggaatccaactttcaagggatgtgaaggacctcttcaaggagaactacaaaccactgttcaatgaaataaaagaggacacaaacaaatggaagaacattccatgctcatggataggaagaatcaatatcgtgaaaatgtccatactgcccaaagtaattcatagattcaatgttatccccatcaagctaccactgactttcttcacagaattggaaaaaactactttaaatttcatatggaaccaaaaaagagcccacatttccaagtcaatcctaagccaaaagaacaaagctggaggcatcacactacctgacttcaaactatactacaaggctacagtaaccaaaacagcatggtactggtagcaaaacagatgtatagaccaatggaacagaacagaggcctcagaaataacaccacacatctaaaatcatctgatctttgacaaacctgacaaaaggaaaaggattccctatttaataaacagtgttgggaaaactgactagccatgtgtagaaagctgaaactggatcccttccttacaccttatacaaaaattaattcaagatggattaaagacttaaatgtaagacctaaaaccataaaaaccctagaagaaaacctaggcaataccattcagacataggcgtgggcaaagacttcatgactaaaaccaaaagcaatggcaacaaaagccaaaattgacaaatgggatctaattaaactgaagagcttctacacagcaaaagaaactatcagcagagtgaacaggcaacctacagaatgggagaaaatttttgcaatctatccatctgacaaagggctaatatccagaatctataaagaacttcaacaaatttacaagaaaaatacaaacaaccccatcaaaaagtaggcaaaggatatgaacagacacttctcaaaagaaggcatttatgcagccaacagacatatgaaaaagtgctcatcatcacttgtcattagagaaatgcaaatcaaaaccacaatgagatactatctcatgccctcatgcctgttaacatcatgatcattaaaagtcaggaaacaacagatgctggagaggatttggagaaataggaatgcttttatgctgttggtgggagtgtaaattagttcaaccattgtggaagacagtgtggtgattcctcaaggatctagaaccagaattaccatttgacccagcaatctcattactgtctgtctacccaaaggattataaatcatgctactataaagacatatgcacacgtatgtttattgtggcactgttcacaatagcaaagtcttggaaccaacccaaatgtccatcagtaatagactgcataaagaaaatgtggcacatatgcaccaaggaatactatgcagccataaaaaggatgacttcatgtcctttgcagggacatggatgaagctggaaaccatcattctcagcaaactatcacaaggacggaaaaccaacactgcatattctcactcataagtgggagttgaacaatgagaacacatgggcacagggaggggaacatcacacaccagggcctgctggggggtcggggcttgggggaaggatagcattaggagaaatacctaatgtaaataagttgatgggtgcagcacaccaacatggcacatgtatacctatgtaacaaaactgcatgttgtgcacatgtaccccagaacttaaagtataataaaactatattctattgaataaacctttttgaaccataatatggcattaaacattccagattattgccattctgtacattgctatctctttaccatattcaccaagtttaccttagccatgttgttaattggtttgttatatttatattaggttttgttacgtttatattttgtttattttcttattctatccatctttcttggccagctcaaatcctaagaagtcatctccaacactcactatctccttagtagcaattacttccttcttccttaggaaactgataactttgtcacaatttactgttggtatttaacatattgtaacttgcaaataaattgtgtgtgtaaattcctgtgttgtatgtactaggctgtgagaactttcctgtttgggactatgtcctgttcatctttgtatatcatagtgcaaggaatttattatttgtgaattaaacagatttatcaatgtagaaatatataaaattctgcagcaaaatatggaaaattatatcctgatatacgtttgttaattctttattcatttttcatacattggttttacatataaaatattatcaagacactaccatgtgcttaatacaaggtactaaataaactgaaatttattttataatttaattctacaaataaatccactctggtagcatttggggaatataatattgactttatattttaaaataaaaatatgaaagtttattttattttattttattttgagaaaatactggcaaattagaaaatactggcaaatgtttttgcacgtggtctcttaagaaccatagctcagaaccctgggatgtgatacagtactattcacatcagtactactcagacacattgaaaacctggtcctgtgtcaagtcccatgaagggaatccctaagggaatagagaagagaatgctatttaatgatttgatgcatgatagtaaccacaggagaataaaacttcgaaagagtctttataaactgggtttaatgaaactgatcatttccagttctattgtatatcatttactgccttagctggcaagactctagaaatagaaatagagaagattcttccttctcatatgtgtacattttaatatcttgaatatagaggactacttatagaattcagtgaagtcaccaaaggttgaataattagctatttctgccctttactagttgttagatttaacattatcaacctttgcagtgaaaagtagaaaaaatacaaactgcaccaacagttgggctagtcatacattttacacagtgacaatatcccattaaaatggtattcttaaagaggagatgtgtgaattaatatgcagtggcacatagaattaaccaggcatcatcattttatttcagaagcactcatatgattaaatttctgagctaaaaattcatccttaaaagttatactttagcagaatgactgattttattttatagctgtcaatttgattgacaagtaggatccatcaagtgtgtttctattcttgtaatccagggacaccttgaaaagatttcgcaagagaaaagaaagaaatattatagaaaaaaaaaaggaaatcgcatgtctaattaagagcttaatttgtgatgaaaatacataattttttttttacatccactatggtgctaaaacaactacactggaaaaatcccttagttatggggtaattggtatgaatcaaatatctttcttatttagaaaccatttatagtgctgaattcatttcatttatagtagtgtcattttgtatttttatgcagtttgaattggtactgttttctaattgcagcaaggactttactgcataataatttaaaattttagctttgtaatagctcatgaaaatattcaatattttgttttgttgtgatggttaatattaggtgtcaacttgattggactgagggatgcctagatggctggtgaagcattgtttctgggtgtgtttgtgagggtattgccagaggagactgacatttgcctcagtgagctaggagaggaagacccaccctcagtgtgggttagcatcatccaatcagctgccagcatggctagaataaagcagggggaagaaggtgggataagctggcttgctaaatctgccggctctttttcttttgcctgttttggacacttgcttccactcttctgcccatagataccagactccatgttcattggcttttggaatctgtgacttgcaccagtggcttccccagggctgtcaggccttctgcagcagactgaaggctgcactgtcagcttttctggttttgagtctttccaacttggactgagaaattataggcttctctccccaacttgcagatagcctatcatgggacttcaccttgtaatgatgtgatccaattctccctaataaactctctcctatgtatacatagatccaattgtttctgcccctctggagaaccctaatacaatcatatttactggtgtatttagtgctagatgtttacatgatataatggtgtgagttctcaagaatctgagataaggtcttgggtgtaggtagtttacttggaaggagatcccagggtcaggaatgagagtgaagagtgagaaggaggaaagggcaatgtacgagtacgttttcaaggtcatgcctctgtgagcaatgtggactagattccactggggattgctcctaagaggcatagagaatacctcttaaattatctgtctagggaagagcaggcaagaacatatatccactggttcttctatattggttaacactccaaggacattaactccttctcacttccaggctgcattaacttacctcaaggcaaaaggtgatcagtatagaacaagcctaaaagctcctaagaacagtccagtagctatggctgaactcagaggtgggtgcagaggctgtgaggtggagcagcagagggattctgttaggcaggggttatgtaacatgattgattccgcagcccaaaggagaacttgacacccaaatagcaccaaaaacaatagatttcaaatattttctcttgtggacaatacatacattacagttatttatgtgtcgcttaatgacagggatatgatctgagaaatgaatcattaaatgatttcatcattatgcaaatgtcacagagtgcacttacacaaacctagatggtacagcctgctgcaaatttaggctacctgatacagcctagtcctcctaggctacttaacctgtaccggatgtgactatactgaatactgtaggcagttgtaacatgatggtaagtatttatgtatccaaacaagaaaaggtatagtgaaaatacagtattataatcttaagggattgccattgtatatgtgagcccatcattatccaaaatgtcattatgtgacacatgactgtatatgattctactgggcatacagagacaaaaatttatgaaataatacccttgctgtgcacaatgaggtctgatgttttctattctgttctacgctgtgttattctgttctatttaattaaacactgctcttcataactccctaaagtaatttttaaatccatggtttggaaaacattggccgaaaagataattaatttacctaagaaggtaaatattagcgtattaaaaataatggaaatcatgtaacctaagccatatacagtgagatgtttagaaataaaggtcatagttttaaggtcaagaaagactcaattcttaagaaattagaaaatagagtagcatggtttaaatgtgtaccatggttctagatttcatctgtcagtgtttcagaatctgcaaatggataaagaacatctagctccctaagagaattaacagggagggaacacagaagggctgaaaaatgaggtgctgttctccttcttttacctcagctgctgtgattcctgctatcccaattcatatacatatagtgaggagaattcgtatatacagcctgtataagtatgtgtacatatacacagccagctagatgttaccctataggtagagcttcctagtgccctatctcaggatccttttgcatcttatgtttgtttcaggttgttttgacagttgtcacttttaagcttcttttctcttttcatagagaaagagctttcagtctcctaagaggatagctctattatcataatcaccttttagaagagaaaattacctgtaatttttatgctctgaaggtgtgtcatcataattcagccacccactttaccctcaaaatcaaatggatttttttaaagaaacttctttattctttcttattgcattttctttggaggaaatgagagcttaagaatatgggaaatcccatcaagtttctatgagctttgctgcctctttctactgtcagctgttgtgtttaaggatatcacagccacagtgatctgcaagcactgctgttgtaagacttgtctcaacagagtacagtttaaagagtaagtgaacaagtaagggaatagtaaccctcacacaagccataactttccatcagatccctcatgcttacaagctccacctttgctgttgtgtacacagctcctcctggaagcccgacctccccatcccaccccagcactcctgtaaatctgtctcatgggaaagataacacaggagtgtgtgctcacaggttaccaatcaatatcaatatttcaccaaatctcagttgtaattgattatcttccagttattggagaataaaccccaaaaggggtggataaagggaaaaaatgcaaaaacccagaatgtcatgtgccttttgccagctactgctggatgtgttctacaactgagtacacagctgtttctaataaacactattagtactaatccttaagcagttattgccttctcctcattgcagtagatcctccagtatagcaatctgaaaaactgacctcattgtcaagtcaattggtgtcttgtgaaatgacaatttggtggtaaagtaactttcgcaaagtgttgcctactacagattctgaaaagtatcaaggttaaaaaatttatttaacttttcaaacctagaatttctcacatttattatttcatgggccgggcgcggtggcttacgcctgtaatcccagcactttggcaggccgaggcgggcagatcacgaggtcaggagatcgagaccatcctggctaacacggtgaaactccatctctactaaaaatacaaaaaaaatagctgagcatggtggcaggcgcctgtagtccgagctatttgggaggctgaggcaggagaatggcgtgaacccgggaggtggagcttgcagtgagccaagattgcgccactgtactccagcgtgggcgacagagcgagactccatctcaaaacaaacaaacaaaaaaaacccacatcttttgattcttaaaggacagtgactatttgcacaactcagtatggaaaataaggttttgcccagcgtgccattttttatcacgtgggtgcctttacactcctttttctacgatgctttctccaagttcccttggaatattctctcatcccttcaaatgacagagcttcctatgccagataatttttttattgtaccaccaatgtcaacctcagtgacattggccataaactacaaaatcatggctatatgtatatgcaaataaaaaatgtcacagtactgattttttatttttgtcccttgattcacttggtgtctcggtgtgacttttcaagccccagaggagtgaactccttttctcctttcctgtttccatccagctggttccagatcagcatcaaagtgaaacggatttgggtactgaaaaggtaatgagcttcacttatagggagaaggaaaacagaggatacagctatgcatattggttattacttacttccttgagtataatccttattcatttattcaaatatcatcatcatccttttgtttgtagtagtactggtagtttgttgagactctactttgtcccaaatattatttagagcatatgtaaatgttaattttttcagtcctcacagaaaccctataaagtatgtctcacattcttcactctacaaataaaacaggccaagaaaaatgaagacacttgccccagtcacatggtaatatatggcagaaccaaaaatcaaacttaggtcactttagttcaaagcttttttttttccctccactatgagctactgctctccaggcttgatcatctcttgggtgctagccactgatatgctccccagattccagtggctttcattcatggcttctacttcaccaggaagtgcctgtcctttagccaaagagaaaatacttttgtttttgccccagtttttttgtcctggtagtggggctaaagatggaaattcgccatttgtttctataatagatactgataaggaccaccaaaatgatggaaaatgtgcaagcttcaaagcaaaagcctacaagaagggagtataaactgaaaaagttacattagatagcacagatttgctgggctcaaaatatatccctctggctgtcattagcacagaactatagtaggatttaagaaatgtttgaagaattcatggcaaaagataaaatgtgttatccagttgcaagacatcatagagaccatgagggaccacatttgcaaatatagttcattctgacaacagttgtgtgtgcatcttaggacagtcattacatatggttagtcattatttatggaatatctattgtatacagatgggttggtagttaagaaggaaatattctttagctcctgttgctacaaaataaacattgatcagtgtttacaccatgccaagaaagtatttgaatattaaaatctcaattcactaaatggtggtatgtggcaacaaatggtaattaaaataaatatttgataggtttttattgtttaaaatgggaggcaatttagtgagagttataatacacagtggtataataaaatggctaataaatttcactgttttttaagaagtggagaaccaattagacaaagtacttctcatttattttttaagagagaaagagagtgtgtgggtgtgtgtccattcacacatgtcactacacattaccctagaacactgtggggtttagtaagacccttttaaatatagaatgccattaaataaaaatacagaaactagttttcagtctaaatatagtaatatagtaactgcttgttgcacttattgtgaatatttcagaggataaaccatggcaaatcgttcaatcctttccttttttctgtactttgttaactcatggtaaatttaacctgtttttctctcttaaatctaataatttttattcttttccttcataattaacagtgttttagatagtattttaaataattttatacaaagtagtttacactcacaagattttttttaaaattcaaaatatttgatgaggcagccttttcagaaatgtcaaagtagtaatgcttaactaaagtatatagcagtttaaggacaaagagaagtcaatcattatccatgttgacaacatgagtacccaccaaaatataatttttaatgaggtacacaattagctgcttttatatggatcataatataagttctgccccatcccccactccatcattctatgatgacaaattactatttttgaatgttggggaagcgctagcaagctctttctttgttcactcagtaaaacaggttttatatggctcttcaaataactcctaaaacaaacttattataagacatgacaagtaaaccttcctgcttattacttttcataagcacatcttcaaaaatgtccaaaaaaatgtaaggtcaaaaggataagggtggggaaagcttgtacaagataaaagttaaattctttgggaaggcaaccattccgatgatttaaaaagcatttatgtaacatggtgaaaccctgtctctactaaaaatacaaaaattagccgggtgtggtggtgggtgcctgtagtcccagctactcaggaggctgaggcaggagaatggcatgaacccaggaggtggagcttgcagtgagctgagattgcaccactgcactccagcctgggtgacagagcgagactccgtctcaaaaaaaaaaaaaaaaaaaagcatttatgttgatgattgatgagacacagaaagatatttgctatactagaagtttacagagtttctcatatcctcctcaactttcttgttttcagtactcttttcaattaggaatgataggaaactgtatttcttttccttgatggagtaacaaagggtgataggaatactccttatttaataatgatgtatgttatacatccatggtcttcttggtcgttcattcctgagctagtttctaaattagaacttgattcatctaaaaatggggtggattcttaaactagggacttacaggaaaaggcaaccttttagttttctgcatattgtattcaactctggaatcttgtgtccagttctgggcatgttcatagatttaattcatgtcaacaaatatttactcagtgccactttatacataaaacactaccctaggactttggttgtccaatcaagatcctatcacattctatattatgcaaataactagactttttacaaactgaatggctttccctggcctcagtgtatttacaaactagtagaagagacaaatacagaaacacataattaaaatacagaaaaataaatacaaaattagtatatggatagcatatgaaaggtaaaggaggtcccaatcccgccctctagtcatggaaaccacgagttcgttattaatacaaagtcaatggagggtaattgagtgacaggaagagagacaggtgctgggcagaaaccacatcagtgcacttgtgacattttatttaatggtaaattctatcatattcatggtaattgcctgtgactgcaaaatgaggaaaggttacatgtatttgtcttctcatcattatcaccactgtaaacttttttctaaatacccatatgtgggtggagctaatagaagccccacatttttgttagaaccattgtggtcacctgagaactcgtgacctttttcaagcgggaaggtacctctctggtagctttatgtattatgaatttgaagggacaagcttgggaacagaaagatcagttaggaggtgaccataggagtcacgtgaaagctgacaaaagcctgagctcaggcagtagtgttacagataaagaagaagagatggagcaggattcaaaaatatatatgtatataaacttacttgattagatgaagtacatgaaggaataaaagactactcttaggattatagcttgggtagtagcaatttagtggtgtggtactatgacattaatgggaacccactgaacatcaaaagaatatatttatacttttccatattagcaaaacctaaagaagactcagattaataggcaaataccaaacaaaaaaatgaagagggtacttcagaagtacctgtttacttattgaaagtagtatctgtttactcattgaaaattcatccatttgaaagcgtttacaatgttggtgggagtgtaaattagttcaaccattgtggaagacagtgtggcaattctttaaagacctagaggcagaaatatcatttgacccagaaatcccattactggatatgtacccaaaggaatataaataattctgttataaagatacatgcacacatgttcattgcagtactattcacaatagcaaagacatgtaaccaacctaaatgcccatcattgataggctggataaagaaaatgtggaacatatactccatggaatactatgcagccataaaggggaacaagatcatgtccttttcagggacacagatggttcctggaagccattatccttagtaaactaacgcaggaacagaaaaccaaataccacatattctcactcgtaagtgggagctgaatgatgagaacacatggacacatgaggggaacaacccacagtggggcccttcagtgggtagtgagtggaatgagggagagcatcaggaagaatagctaatagatactgggcttaatatctaagtgatgggatgatctgtgcagcaaaccaccatagcacatgtttatctgtgtaacaaacctgcacatcctgcacataaaagttggaaagaaaaaaaaagaaaattcatccatttgaaattcatgtgctacttttttctccccacttattatttgattttgttgagtgtattttgataacaacatgaactgtgaataaaatggcatgcaattgaaaggcagtaattgctaggtaagtaatactaagtaggtatagtggggtcatatttttaatcaagtgataaatagttggagagaacaaaaatgaacagccttgttatacatgcaaatgtcataacttcattcagttttatctgtctagctgtatgcactatgtggaagtgaatgcaagtcaaattcatgaagtaattatctagattaagaactaaaaggattcagtgcacttgattgttgacattttatttaatggtaaaatctatcatcttcatgataattgcttgtgactgcaaaatgaggaaaggttacatgtatttgtcttctcatcattatcaccattgtaaacttttttctaaatatccatatgtgggtggtgctagtagaatcaccacacttttgttaaaagcattacgtttgctttctccaggataattctgacaacaatagtacaaaacttatcatcttttattttggtcccttacctcctctatttccaataatttattggtgtctaatgtaataccataacctgttctcccaagctccatttctgtggttattttctccttttccttcttccttctcctttgatacacaataccatcacatgttgctgatctttccactgcactgccttttttgttcaataaaaatgtaaggtccccagctcacatgtatgcttcagtgtgcagctccagagctgctgtccaatatggtagccactagccacatgtgactattgaatactttagatatggctagtcaaaattgagatgtgctgtaaataaaaactacataccagacttgaagactttctccaaaataagaatatttaaaaagtcattaatgatttttaatttgattacagtttgaactgataatactttgaatgtattaaataaaatgctatttaattagttggacttttttgtttttaacatgcctattagaaattttgaaattgtgtacatctcctacatctgaggcctacattgtttttctattggacagcattgcaataaaggacactagagttaaagagggcatgctctctgctccaagactgtgcagctagactaactataatatcataaattggagccaggcttggtggctcatgcttgtaatcccagcactttgggaggccaagacaggtggatcacctgaggttgggagtacgagaccagcctgaccaaaatggagaaacgctgtctctactaaacgtgcaaaattagccaggcatggtggcacatgcctgtaatcccagctactcaggaggctgaggtaggagaatcacttgaacccaggaggcggaggttgcagtgagccgagatcacaccattgcactccagcctgggtaacgagctaaactctgtctctaaatacatacatacatacatacatacatacatacatacatacagtgatatggtccataggagagtgtaaagagaagagtgagtaaacatttctaacagggcatttgaggaaagatccatggaagaagtgatattgaatcatcatagaaggagggcaatggtgttagcatttcaagtacagaagacagtgtaagttaagtcttggtgacaagaaacaggctgctgaaacagtcacctcaaatattattttatcacatcactgctctatggccaaccatagaaaaataaaaatctatccagaaaatattttaagcttcttaccagtttttcttaaaagcatctgtttctacttccttacctactcccactgagaaaaaaaggttcctctcaggccgggcatggtggctgacacctgtaatcacagcacattgttgggaggccaaggcacgtgggtcacctgaggtgaggagtttgagaccagccagaccaacatggtaaaactccgtctctactaaaaaatacaaaaattagccggacatggtggtgggtgcctgtaatccgagctacttgggaggctgaggcaggagaatcacttgaacctgggaggcggaggttgcagtgagctgagatgtgccattgcactgcagccggggtgacagagcaagactccatctcaaaaaaaaaaaaaaaaaaaagtgcctctcaatgaggtgtaaaggtagtggtacttacggcagactagaaagatgctatgtcagtcgtgctgctagggacctctgaggagctaaactctggttttagctactgaaatgggaaagaagtagctcgcctgtacccatgcttaactccaggagggaggggaaacacaagagtaacacttcccaatagtatgtctcctgagaattgggatatcttatggttcaccataaagtatctgttgagtaaggaaacatgaacaaaggaaaaagaggcagatagaaatgaagaaagtagggaaaatcaattctaaaagacatgttttatagataataagaaactaattaggagcataaaagagaattgagggttatagctcaggcagtgcagtatcctccacaggtttgaattcaggcactggcctgtgctgcccttaggttgtaggcaagctgcttaccctctctgactttcaattccctaatctgtaaaaagtaaagtctaagaattagaaacaaggtaaaacatagtgtctggcactctgtaagtgttaaataaatgttaattttatgttcgaccactgtttgctaaataattttgaaatgtatccttttttggttgattccctgggaattcagttaggaagagaggaagtcaaattgtctctgtttgtagatgacatgattgtatatttacaattgtctcggcccaaaatcttcttaagctgaaaagcaacttcagcaacatctcaagatacaaaatcaatgtgcaaaaatcacaagcattcctatacaccaataatagacaaacagcgagccaaatcatgagtgaactcccattcacaattgctacaaagagaataaaatacctaggaatccaacttacaagggatgtgaaggaccttttcagggagaactacaaatcaccgttcaaggaaataagagaggacacaaacaaatggaaaaacattccatgctcgtggataggaagaatcaatatcatgaaaatggccatactgcccaaagtaattatagattcaatgctatccccatcaagttaccattgactttcttcacagaattagaaaaaaactactttaaatttcatatggaaccaaaaaagaacccgtatagccaagacaatcccaagcaaaaagaactaagctggaggcatcacactacctgacttcaaacaatactacaaggctacagtaaccaaaacagcatggtactggtaccaaaacagatgtatagaccagtggaaaagaaaagaggcctcagaaatattgccacatatctaccaccatctaatctttgacaaacctgacaaaaacaagaaatggggaaaggattccctatttaataaatggtgttgggaaaactggctagccatatgcaaaaatctgaaactggaccccttccttacaccttatacaaaaattaactcaagatggattaaagacttaaacgtaagacctaaaaccataaaaaccctagaagaaaacctaggcaatacccttcaggacataggcatgggcaaagacttcatgactaaaacaccaaaagcaatggcaacaaaagccaaaattgacaaatgggatctaattaaactaaagagcttctgcacagcaaaagaaactatcagcagagtgaacaggcaacctagagaatgggagaaagtttttgcaatctatccatctgacaaagggctaatacccagattctacaaagaacttcaacaaatttacaagaaaagtacaaacaacccatcaaaagtgggctaaggacatgaaagacacctttcagaagaagacatttatgcagccaacaaacatgaaaaaaagctcatcatcactggtcattggaggaatgcaaatcaaaaccacaatgagataccatctcacaccagttagaatggtgattattaaaaagtcaggaaacaacagttgctggagaggatgtggagaaataggaacacttttacattgttggtgggactgtaaattagttcacccattgtggaagacagtgtggtgattcctcaaggatctagaaccagaattaccatttgacccagcaatcccattactggatatatacccaaaggattataaataattctataaagacacatgcacatgtatgtttattgtggcactgttcacaatagcaaagtcttggaaccaacccaaatgcccatcaatcatagactggataaagaaaatgtgggacacatacaccatggaatactatgcaaccataaaaaaggatgagttcacatcctttgtagggacatggatgaagctggaaaccatcattctcagcaaactaacacaagaacagaaaaccaaacaccgcatgttctcactcataagtgggagttgaacaatgagaacacagggacacagggaggggacatcacacaccggtgcctgttgtgagggtggggagctaggggaagggtagcattaggagaaatacctaatttagatgatgggttgatgggtgcagcaaaccaccatggcacgtgtataactatgtaacaaagttgcatgttttgcacatgtaccccagcacttaaagtataatttaaaaaaagaaaaagagatggtccactctaagagaagtggagccaccaaatctaccttaaaaagaagtaatcaaaaacctcaaatgaataagcattctaaagtggatatactatctaaagccatacaattaactagttaactatcacgggggagccagagtaagtatgttaagttctcttctattcattaaaccactttgagtgtaccatctgtttcttgctgggatactgagtgataaaactgataaatttttgttctttttttgtacttgttttaaaaatcaaaatgtgcgtctacaatgaaaagcaatgacagtttgagttaccaaagtgctaagggatttgctactaggatgggtaccaacaatgttagtaaagtcagtggagctgccctctgtaggctagtcctgccctccatagacaaaagatactgctgaaggactggcttccctgagagcaatgtggtggtatgctccccagatgaaagagactgtctggtagcacctgatcatcagaaacaagcaaaatgcaatgatcactgtaagtgtcacgtttggagataaaaggcaatcctgtactttctacctttaaaaactacagactttaaaaaaaattgaagacacacaagaaatggaaagatatttaatattaatggatcggaaggatcaatattattaaaatgttcatactacccaaagcaatctacagattcaatgcaatcactatcaaaatactaatgacattcttcacagaaatagaaaaaataattctgaaatatatatggaaccataaaagacccaaaatagccaaatccattatgagcaaaaagaataagactggagaaattacattacctgacttaaattatactacagagctatggtaaccaaaacagcatggtactggcataaaaatagacacataggctaatagaacagaatagagagctcagaaataaatttatacatctgtagttaactcatttttgccaagggtgccaagaacatgcattgaggaaaggatcgtctcttcaataaatggttctgggaagactggatatccatatgtagaaaaacgaactggaccactgtctctcaccataggcacatcaaatcaaaatagattaaagatttaaattcttagacctcaaactatgaaactactaaaaggaaccattgtagaaactctgcaggacattggagtgggaaaagattcaattagtagtagctcaaaaacactggtgaccaaagcaaaaatggaccaataggatcacatcaacttaaaaagcttctgtacatcaaaggaaacaatcaaaaaagtgaagatacaacccacagaatgggagaaaatatttgcaaactatctatctgacaagggattaaaaaccagaatatgtagggagctcaaacaactcaataggaaaaaaaactaataatttgattaaaaaatgagtaaaagatctgaatagacactactcaaaagaagacacacaaatggaaaacaggtatatgaaaaggtgctaaacatccttaatcatcagagaaatgcaaaacaaaactaccatgagcatctcaacctagataaaaatggcttttatccaaaagacagatgacaatgaatcctgctgaggatctggagaaaggggaaccctcatatgctgttggtgggaaaataaattagtacagttctgttggagaagagtatggaggttccccaaaaatctaaaaataaaactaccatatgatccagcaatcccactgctagttatataccccacagaaaggaaatcagtatattgaagagataactgcactcccatgtttattgtaacgctagtcacaatagccaagatttgcattcaacctgtccacagacaaattaataaggaaaatgtggtacatatgcacatggaatactattcagccatgagaatgagatcctgttatttgcaacaacatgaatgaaactggaggacattatgctaagtgaaataagcccagctcagaaggatgactattgcatgttctcacccatttgtgggagctacaaattaaaacagttgaactcatggagatagagagtagaatgatggttaccagagactggaaagggtactggaaaggagagaggaaaatggggttggctaatcggtacaacaatatacttagatacaatgaataagatgtagtatctgatagcacaacagggtgactagtcaggaataattttttgtacattttagaataactgagggaatacaactggaatctttataactcaaataaatgattaatgtttgcagtgatggatatctcatttaccctgatgtgattattacacattgtatgcctgtatcgaaatacttatgtaccccataaatatatataccttctatatagccataaaaataaaaaattaaaaaaataaaaattaaaagaaaatactaggagagtattttattccatcaattctaaaacacacctttttccttcctgttgtttaaaatcactgaacccaggatatgtcttaccatatttgaagaaagaccatgggtcctagtgattgcaaacattcttttgctcatcttccgctaaaatcgagatgttccaacctcaaagcctgaagagtgaaacctcttaagaaatattcttgatgtcccagagaatgaaacaggtgggaaaacatggacaacaatacctccaacttgaaaagtgattcagaagagttagaccctgaaaatgaggaactttggcaataacttcacagcattattgtgcttatattttctttttatgtgtgactagaatgaatataataaaaaatatatctaaatcagtcaaatattttagcagttgttaaaggaaatactaagatatgcaaacatgtcatggtttaattttttcctggtggtacacaaaatactcataccttttgctattgatggagtcttacattctatgaaatacatttatttttttcaaacctattgtaaaagggtacataaaagataggacagagcaacaccctcaagtttgtaggatattcttatatatccttaggccaaggcaggctaagggcagaggcatgaggtaagcaaaatatatctttgattttgactttctgttctctctcaagtagagagaagcaggtcagtgtaactaaagggcaaagaatttggagtgcagtttagttcttgctccagtggttgctggtatgtggatgtgtgtgggtcatgtcaactctgtgttttttctgaggatactgataaggttcattaaaagtgtatttgaaaggtgccataaaatactattaaatcattctttcttctttgcctgttttacaaacagaaaagaaactcagtatagtttgtctcaagggagattactatattgttacctattcacatccacagtcatacactgtgactaaccagttatagcctacagtctacatgtggccaaatgtttcagagtctctaggagatagaggaatgctcccctaggaggagttgaggaatgcattttcaagagaggactgataatatttctaagagagattccctgattgccttcgatatccaagtttgggcatctcattgccaaggttccttctcctggcctgcttcctcagtctttctccccagctgttgagggctgtattccctgtccaagctcctcctcctttccaaattagttccaatcagttcccctggcctgtccccaccactcggtcagctcgctcagtacttctaaacctcatgtgtctgctccgtatctctgttcttcagagccagtctttctgtatcttcagtctagtaagtgctgctttcataaactagacttaaaatttcatcgcattttaataaaaagtaattactttatatatgatctttaagcagctattctcttaaagaggtactaaatggtgagactttctggtaagggaagaagagagaatgatgccttgaccagtgtttgaggagttaacttcttgagaaaatattgcttacagtctggtaccaacatattattggcagtaatattcattaaacattgttagcatattcgtagtctctaaacaatggctttcaaatattttgactacaactcataataaatacattttacatcctgacccagagcacacatatatgtttatgtatataaaaagtacatctaactaaaaaagattcatttaaaaaaataaaactcctagccttacaactcactaaaagattgcaaccagcagtttaaaaaaccgtgatacataacatgtccttttggcaagtttgaacagcaatgtgtttggtggtttatgttactcgctggaaaacaagcgtttttgaaaccattatagtgttgaaagaaagtataacaaataatcttagattacagttgtctgtgattattccaaatctgaattttccattcctgtgttatttttctcagggactaaatttctaaatgtgattttgtagcagatgaatgagacagggaaagtaaggctattgtttttatgaaatctaggctacattttattccaatcttgtttctgatatcttttctcttaaattgatgttatcattcagcttccattaagaaatgacttctgcatccatttgccttgtgtgtatatgttcacaaatgagtcaatcatatttcattccttaatttctgtagtgagaaaaactgtccatcctaaaggaagaacttgaagaatttcttgctctcctaatggtttttcactaaatccaattctactaaacatgtcattgttaggaataacattttgttttgttttatttcaaggatatgcttcatcatcatcattaccaccatctaaatgcattgttggcagtatggaaaggcaacaataatctttaacatttaaatattttctagtaggttacagatgcattaaatattccattttgtcttagtgaacaaattcaataaatgaggctaaatgtcttatgaagctaactttatgtacttaaaattgaagaatatgaatataaaaatatactatatttaatccatctttagttaatttttgtaaggaagaggtctagtttaagtcttctgcatatggctagccagttatcccaacaccatttattaaatagggagtcctttctctattgcttgtttctgtcgactttgtcaaagatcagatggttgtaggtttgcggcctgatttctgggctctcttatctgttccattggtctgtgtgtctgtttttgtaccagtaccatgctgttttggttgctatagcaggtagtgtgattcctccagcttggttctgtttgcttaggacttccttggctatttgggctctttttggttccatatgaattttaaaatagttttttgtaattcagtgaagaatgtcattggtagtttgataggaatagcattgaatctataaattgctttgagcagtatggctattttaacaatattgatttttcctatccatgaacatagaatgtttttccatttgtttgtaccatctctgatttctttgagcagtgttttgtaaatctcattgcagagatcttttacctccatggttaattgtattcctaagtaggtagtttatttatttatttatttggtggctattgtgaatgggactgcattcttgatttgggtctcagattggatgttgttggtgtataggaatactattgatttttaaatattaattttgtatcctgaaactttgctgaagttgtttatcagatcaaggagttttagggtagagactatggggttttctaggtatagaatcatattgtctgaaaacagggttagtttgacgtcctctcttcctatttggatgccttttttttctttctcttgcctcattaccctggccaggacttctagtactatcttgaataggagtgttgagagagggcatccttgtcttgttccggctttcaagggaaatgtttccagcttttgcccatgcagtatgatgttgattgtggatttgtcataggtggctcttattattttgaaatatgttcattcaatgcctagcttgttgaggtttttaacatgaaaggatgttgaattttatcaaaagccttttctgcatcttttgagttaaccatgtggtttttgtttttagttctctttaggtgatgaatcacattaaaggcataaatgtataacctaaaactataaaaaactcaggaggataacctaagaaataccatttcagacataagactgggcaaagattttatgaggaagatgccaaaaacaattgcaacgaaaccaaaaattgacaaaggagatctaattaaactaaagatctgcacaccaaaagaaactatcaggagagtaaacagataagctccagaatggtagaaaatataaggtctaatatctggaatctgtaaagaacttaaacatatttccaagccaaaaacaaacaacttcattaaaaagtgggcaaaggacacaaacagacacttttcaaaagaagacatacacatggccaataagcatatgaaaaaatgcccaacatcactaatcattagagaaattcaaatcaaaaccacagtgagataccatttaacaccagtcagaatggctatgattaaaaagtcaaaaaataacagctactggcgaggttgtggagaaaaacgaatgcttatacactgttgatgggaatgtaaattagttcagccattatggaagacagtgtggtgattcctcagagacctaaagacagaaatatcattcaacccagcaatcccattactgggtatatacccaaaggaatatacattgttccattataaagacacatgcatgtgtatgttcactgcagcactattcagaatagcgagatatagaatcaacctaaatgtccatcaatggtagactggataaagaaaatgttgttcatatataccatggaatactacacagccataaaaaaagaatgagagcttgttctttgaagcaacatggatggagctgaagccattattgtaagtgaactaacacaggaacagaaaaccaaatatcacatgttcactctcacttttaagtgtgagctaaacatcatgtacatacagaggggacaacagacaccagggcctactttagggcagggggtaggaggagagtgaggatcaaaaaactacctatcaggtactatgcttgttacctgggtgatgaaattatctgtacaacaaacacccgtgacatgcaatttacctatataacaaacctgcacacttttaggtaccgctgaacctaaaagttttaaaaacagtatatattatatactataatatatatatatatatatatatatatatatatatattccatgctgattaaagaaagcagttttgtcattaaagaatgacatttttgcttatcacttgagaataatgtgcctgtttatgccaatgtagaaaatagactctaatttttcattcaacctatgcattccacaaagataattcctgagggttagaaatgtacatagacacaagaagattacaatcaagagaggaaacaggtttataaaaaataattaaaatacaatgtgatcccttagctagaccttgaaagacatgtagaggggaaattattccaaatgagacagcagttgtgagaaacaatatcaagatattttcactctttctagcctggcataattaattgtgattactctggcaagtatgacatcttctaaatttacaaaaacagctattttgtcattgagggaatcattttttgctgtgctgatattacaataataagctggcttgtgtcattgcagaaaatggtctgtaattaaatcttcctgaacttctaaagagcagtttccacaaaatggctgtatcttctaatttcctttccattttctcagcaagacatagtccctatgacaaaagtaagattttttgaatatatttctcagtttcctggcaaagttgctcatttgcaaagtcacacacccagcccacagaaatttaaaaaaaaacatattttagtcattcatttggcaatgctttttacacaaacaggtaattaggaacactgaaaagacttaaaagatcctcaatctgaagtgataacgctcagagtatgtattggataacggcagtaagacagcagtccccaccaattcttccttctagcttcaatccccatatcttcctcccacctaattccttcccaggttttaaaaagaataaaagactttaaaaaatgaatttgtggcagtatggaatttttatttatttgcttatagcatgtctccattactttaaataccataaaagcagacatctcatctgtcttatttattcctctatacctagcacatggaacaatataaagcatgtattacaaactcaacaaatatttggtgaatgaatgaataagtgaaataaatcaatattaaatgaagtaaatcttctccttggcaatcatacttttcataaatatgaagacattgtcacactgtcattcttatcaaaagtaagggagagggaaatgagcattttgtgattgtttaaacattgcagtcaacacttattgaacatccactacttcttacataaagataaatagagatagtccctcctctcagagtgtagatttagatggggttgcaaatatgcaaacagataagtgtcataatattgatcttcggtaattataaaatttacatcttcagttttaactattcagaagtgatctcagagtagttatatatagtaaatatatttttgcctaagcatgcatgcatttaaatcacccatgctgcaaggcttgagtagagagctagtcagtgattttagattagtgttcaccatctgcacatccacatggcttgtgttctgtctcattcttagataaacattttttgggaaaaatgatttgatgctgtggcatcatgaattcagggatttccaaatatttgtttggagttccaaagaggtgtcttctctatctcttcaggagaattgtcagagtctactatgatatatatgtactaaaatacaggaatgtacaagaaactgggatagcagagaggatgggatgataaactgtggctagtaaagggtgagagaaaggagggcaagaagtcaggagatcgtttgctgagaagttgtatgacacgagtgttgaagattaacagatcgaataggaaattgttaggtaattaaggtaggtaggatggtgcaagaagaagaaatagcatgtataaaatcccagaaatatgaaattatttggggaatttagtaaacaagaaggcatgcggtgttttaagagaaacagttataaaggtgggaggagcatcagatgaaatgggacatttacgaggagccaggccattaggcattatgacttcctttcacagggatctctagatattattagtgggaagttgggagccattgggagattctaatttgggagaaacctgttcagatgaatgtcttagaatgttttagaaagaaccatttggtagctgtgtattggaaatttgaaggggaaattggctggagtcaggtggagaaattagattagtgtgattggccaggtaagaggaggaaaatccctgctaaagtaggaacagtaggaatggagaaaagcagaaaatatggagacatttagaaggcaaaattggcaagatacttcctaagcgattttagtgtacaaagtctagtttctgaatataagttgtttttccttttatttttaagaaacctgtgattttttttccataaatgtgtatatcttttttcactgaattctttttaaatgactggagcaaaggagtccttgaaaaatgtgacctgagtactgtgtttagtagattgaaaattcttcaggggcataagaaattaagaatgtggttttcttccaagatcaagaagctaaggtcatctaatggagaagttcatgtcatccatcacatgttctcatcttgcagatgtggaaaaatgccagtggctggcttctgtttgacagattcagtgagcctgcttcagaggactctgagccaggaaactctcaaggtgggctgcatcccacaggacagctcttgaatttggacagctcttgaatctggtctcatgttgtcaggatgacttggctcaccacaacgtggatgtccttctttgtagcttccttctttcttcagaccttacacaggccctgctatgggaatggctcctgtcctaacagatttgcgttgatatcaaggactccttttttccacactttacctcatacttcaacacttgacttcttgtgcatctcttgcttcctagttttgttctgccattttgttctgaccaacagtcccaacctgttggctctaaaatttcacactcttcacttggcttcaggtcctcggttttaccccgattacgaatcttttaaatattcagttccaaaattattcatccagctctttttgtttcccatgccacatactctttggtaagtccgccacagccagaacatccagaaccacctcaaagctggtatctctcaattcagatttaactcttccattcaaaattatttcacaatctgccaccacctttatctcacccaaagggaacttgttaattttcctttagctcttattccaatccatgacaccaacccactaagccaggtttgggacacccttctttgtaatgctatctcttgtctttaatatccagtcagtcaccaagtcttatcaatttttctcctacatgtgtctctaatcagtctccttctttccattaccattaccacttaaatgtcactaaaaacttttagcctgtagtgtttcctgcccacccgcctaaggtcattctccatcctgtagcccatattaatactctaaaacagaaatacaatctgccaatgtgctacttaatttttgcttgcttacccaatatatatacacttattgatctgtttttctgtggtttttgtttttgttttgttctgagatggagttttgttcttgtcgtccaggctggagtacaatggcccggtctcggctcactgcaccctctgcctcccaggttcaagcgattctcctgcctcagccccccaagtagctgggattacaggtgcccgccaccatgactggctaatttttgtgttttttagtagagacgaggttttaccatgtcggtcaggctggtctcaaactcctgacgtcaggcaatctgcctgcttcagcctcccaaattgctgggattacaggcgtgaaccaccacgcccagcctgatctgctttttatgtgtcaggcactgtgggaggatgcagtgttatcacaataaataaaatatacttagtcaatcttatactcttgatgcctttcagaatctgttaaaagcccttacagttcataaaatcctagtctgttccagcctaccagctgaaaaatggggtattgcaatgggtaagatctacttttcctcgtcctctccctgcccccagagtactgcacagtctgtggatgggtatataaaaggagggaaaaaaaaaaagatctggagtaagaaactagagtccactgctgtcattttagtagtcactggagagtcaagcatttaattaaacatgcaaatgcctgtcactgactacttttaagctcataatttaccatttcaaacatttggctcaaagtactctgaaatattactaacctccatcaatgggaacaaatactttattaatattgtgataaaaagtaattacatattaaaatattaccatatactatacatgatactctaccatggcttcatttttgttttgataataactttacgtgattaaattaacttttaaaaatatatttttaaattgaactatttggtataattctgataattttagaatatgtatactctcctaaatatacaccatgaaaataaatatcacagttagaattttagccaataagaatttatgtcgcactttgggaggccgaggcgggcggatcacgaggtcaggagatcgagaccatcccggctaaaacggtgaaaccccgtctctactaaaaatacaaaaaattagccgggcgtagtggcgggcgcctgtagtcccagctacttgggaggctgaggcaggagaatggcgtgaacccgggaggcggagcctccagtgagccgagatcccgccactgcactccagcctgggcgacagagcgagactccgtctcaaaaaaaaaaaaaaaaaaaaaaaaaaaaaaaaaaaaaagaatttatgtcaataagaagatacatagaaatatcataaatatctgagttgttctctaccaaaataaaggatttcttaaataattcagtctgcaatcctaattatttctgcacagtgtaattaaatttctattgtgaaaattaatattcttaaaaagtaataacatcaattgttgcaggcttctttttaataaacatctacataaggtgtctgtatacttggagatatgcttatctgagtaggagaataagatttggtggtaaagctaatctagtaaatgaaatcaaatgagataatagatgcgaagggcttgacacagagtgttgcacactctaagtgctcagtaaaatgccagagatgatgaggatagtgatgctcacatctgtattgtcaggttatctcgttatcctcattttacacatagagatatgaaagctgcgagagtaacaatgactcactcataagggcaggcagataatatattgcataaccaggagtgaaacactgatttttcaaataggcttaaatccaagactcttaaaccatgctttgagcaagaacttctcaggatttgaaaaataaaaagccttgataacccagtgtggttggaataagcactcaagagcaagagagccacagcttcctcctgtgtaaacaggataaaggcacttaagggcaggtgaccagagagagtgagatggggccggagggaaggatagggtgatcagattcagggattggagccaatttttgtggatctagctacgtgacaatatgaaaaatgaacccaggtcaacaaaagttccttactgggttatagtactcttcttccttttaacttgagaagtagaagggtctgacaaattgagtctgatgaataaactcttgtgttggccaattctgcctgccatgtgcccttagactgcttgcagggctgaggcccacagtagctgtcctggccttttgctgtgttactggttcctggtgtacatctctgaaagggctcaggccacccttagataattccacaaggcaggtgccatggcttggatacactcacttgacccaagttagcttgttctgtttattcatatggttgtttttaacttggtagaaaaagtaaactgaacgggaatggaggaataccttaagcaagtttctgtcaaattattatttacttaaattcattttttaagaaactccctttacgaggtgaaacagttgaagaaaacaatacatttcaaatatctaattcaaaaagcatattaatttatgttcaaagatgttttaagaagtggtttaaattcatatttttactttttttttttgagatggagtttcgctcttgttgcccaggctggaagtgcagtagcatgatcttgactcactgcttcctccgcctcctggattcaagtgattctcctgcctcagcctccaaagtagctgggactacaggcatgcgccaccatgcccagctaatttttgtacttttaatagagacagggctttgccatgttggccaggctggtctcgaactcagcctcaggtgatctgtcctccttggcctcccaaagtgatgggattacaggcgtgagccactgagcctggccattttttacttaaatattgagtcactgctgtgtaccaggaaggttctggtgggtgcttggaatattacagtgagaaaaatgttgttatatctttgttttcccagaagtcagtactaagcaaaggagacaggtaatgaaaacaaaacaaaacagtcaaaataaagtgtaggaaatgttaggagagaagaatcgtgaatacagttcataccagggattcctaagttcctgatgaaaggcttcccaaagtaagtgacttctaagctgtggtctgaaaagtgagaaactatccagctagatgaagggttgagaaaaccagaggaaacaacttatacgcagacatggagcagggatgatggctaagctgggcctctgtggtgatgagaatttctcaagagaagtgttggggcacagtcagaggaaacaatcataaaggatcggggagacaaacagcttgctgtgttttaagatatgcagttgactttgtatcataataaaatatatcaaaataactattttaatagtcctataaaattacacatatataaacatataaataatagtgataaattcatttgctattgaagatattgctttggttaaaactacatatttcttattctgaatttcacatgtctgggggaatggggtcaaaacaaaacaaaccagtgctaaccattctggttctatatgcaaagggattccttaaaattgacattgtgtgcaacacacacacacacacacacacacacacacacacagaactggtctttgatgactattttgtataagttcttcatttagcaggtgctctttctgaaaaagaaaatttcctatttttttttcttttgtttgcttgaatgggatcgatgactggctaatcgtaaataaatactaccaagccttttatttcaaacttcagagctttcttctcaaagcccaggttaaaagaagagtcccagttaaatcaagtgacatattctagtccatagatttactggttcatggttctattattcttttattttgtactaagggcactatcaaaataaataaaaacatcacagctgtactgaaacactaaaagaaaaatcttgaattttcagtagtgattttagaccccactaccaagatttttttttctttttgcagccattaactagttttttaaaaatagctaaatttgggaggatctcaacatacaattttagaaagtctagtctgagattactttatcagttattggaataatctgacaagcagaagtaggactaggaataaagcattgattcaagatttcttgtttaaatggtgcttctcattctttgtttgcaaatcttgaggaatacaaagatgaatgagcatccagtccctttggtgtcaaaaatatcatgctgcaagtatttagaagagggaaagaggaacatttgtgcctggcatagcatttcctttcattttcatttattcttctgcttattaattcacttattcagtcaatcaacaaacatttaaagattgcctactcaatacaaaatccactagtgggtgttgatgatgcagcaatgatttggcactgaaaagaaacttaaggtaatggttctcaaaatttgagaaatctgtgaacttctttgaaaaggtgataggtactatgggtgcaacataggcatatctgtgctcataacttcagtggggctgaggaggatgccttgaagcccaccattggattccttgggacttatgaattttgcttagcaatttcttaattacagttttgttcattgtttgaattttgccatccaatccaaagcttttatccttattataaggttgatttcgttttcataattaacccctaaaagtaatattgggtcaaatcttaaagacacttctccagttgagagacctactgctgacgttaaagaaccaacctgctcagtaaaatgaacatgagcgccatctaatgcccaaacagaataaatgttggtaacaacattaatacacagaagattagagtatggggtgtatgtacaaaggaattaactttgttatcggttggttgactcatttctaacacttgttaattattttttgatattatcattttcaattattttatttcacataacagtcccttactgtctgaatttgaagataagaaacatttttaacaataagaaacattttgttggccaggcgcggtggctcactcctgtaatcccagcactttgggaggccgaggcaggcagatcacctgaggccgcgagtttgagagtagcctgggaaacatggcaaaaccccgtctctactaaagatacaaaaattagccgggcatggtggcgcacgcctgtagtcccagctactcggtagattgaggcaggagaattgcttgaacctgggaggtggaggctgcggtgagccaagatggcaccactgcactccagcctgggtgacagagactctgtctcaaaaaaaaaaaaaaatttgcaaatatgtcctttttattggtggagaagcatatgacttacatttttaaataaatttttgattttagaatgtttttcgtttttcagaataatttgcaaagatagtccatagaatacccaagtatcccacacccagtttcacccagaactaatatggtacaattgttacaattaacaaaccagtatcaatacattattattagctaaagtctacaatttattcatattttcttaattttcccctaatgttcttttatgtttcaaggtcccatctaggacaccacattacatttggtaatcatacctccttaggcttagttatgacagtttgatttacatttgatattgtatgtctttgaattttattttagctttctgttatttttcaaaatcttaaaacaatttaacttttcagaaaacactttcccttgttctgttcccttgataacactgcatgactatttaatcagttttataggggtttgtataaacatacattatcattatgcatcgttcatctctaataatgaaaaaaaagggttaagaaagaggattatcaaaatgtttaacttgccaagattgccaatataatataataaataaatgatgggtcagattccaaagcctatgacaccttccaaaaagctaacacatcttttggcatgcataagcttaaaatgccctccaccccagcaccatgctgctgcaagggcttctggaatgaccaacgcccaagacaaagtcgtttgcctttggagtcccattgcccctcacaagcactttttattttatataaaaagtttatataaaatactctataaatgagcctgggttgccacccaaactgttttgtgtttgccacgaaaacagatgtgctgaggtctcaaggaaacttctgtcttacactaactggaatgcattaagtctgaggagggttcacagttctgtcctagttgctaatattttaattaaacatatatttttgtggcctttaaaagccatcaggagatataaaggaatatttttttgataacttcagtgtcctgggagcaaaatggaatattgtgtttcctaattgaagaagtagtatatatgtgtatatggatgtgaaggaatttatagaatgctggcgaaaatgatttcctgggcaaacagtagaggtatataaattacttggatcctgcagtattgattatttgtgaatatatctgtaaaacattaagtgatttttgtacactcatagatttcaaccttggatgcatattagaaaccctagggagggttaaaaatcccaatacccaatcttcattccaaaccagctaaatcttactctccagtaatcaaattcaaaacagcaattttaaagctccccagttgattccagtgtgtagccaagagttctacattgtaactcaggggtttaatattgttcctgtacttttattctgcagcataaacttagctatgctatttattcttatttttaaaagaaggtatggcttacgaaagatgataagcattattatgtttaacaatcaaactcattattaaaattcctttttttcttatacttctgtcaaatgcattgttttttctctgagtaatttagatgaatgaattaataactgataaacacacatgtaatactatgagactcctttcctaaatccttttatctattttcaaaggattttatttctacatatttaaagttttttaaatcattttttaatttgtgcttctatgaaatttttttcttcctagaaattttattccggattatctgttaagagctgcattttgacagaaaatgattttccttattaactgagtgaattgataagtaagtaggaatattttccagtggtagtctcaagatagaaacttctaagagctttgaagttttagcaattaacagactttattaaaaatgaagccactaacaaggatattaatacaaggtagatttcaatctgggcaattatacaatatagacgtctttattactaactaaaatatcacagaatgatttgattaatgctataaatgtgattagtagaataagtgtatccttagtgccattggttagatagccaaagactggatgtcagagaaaggtttccaattcttttctacatatgagaatcaaaatcaaattatagaaaaaagtcacaattgttttcttgaattccttaaatatgtttttcatccttgaattctgctattactcttcattatagtggtcagtttgtgtgtgcttcaagtatgtcactatgttgttaaatatgtcagctgtctacatttctaacacaaaatgatcttttttttcaaccgctaagttatatgctggttatttctaagtacatgcatattcaatctaagtatctcagttgatttaaatcagtttcttactttgaaaagatttttaagactttttttgcacagaggtaaatttcagattcagcttataggccttaataataacactcctacagactgagtcaaatttaaatatcttatcaggtattaaatatatttaaataaaaacatacacattaatgagtgccctgtgagaaagtggtggtgaatttgagccatattgctatatccccacagcaatatctgacattttattcagtgccatcagctatatgattctagacatgccctcctaatcagtggtttgtagggttttatccttcctcatcagaaaatgtaaacaagattacaaacccactttcttccccaactgtaaaatattaattatttaaaattttaccgtgttttattttatacaagtgataatagctcatattatatggtctgaaattaccagtgatgagaataattatttggtcaaatactttctgtaaagttaaatttatctatgaatggtgcttctgtaatgttgacagtaaatacagtaagatattttgcccaaagtgctgtttgtcttagtgtattacttgatgtgacattctgacaccatcagactggaggctgagtcctctgataaaaagaaaaatgccacatagccacagaaattatttcaccctgtttccttgcacatctgggaaataagcaaaaattgtaaaagctgctagagtgagctgattgttttcttcctaagaatcttgagctttcaaaatttgaatttaaaataatggactttcttgtcagaaaaatattgattattaagaaaagaatgagacaaaaatgtaaaaagaaattttacttacctaattttattaaaggagtatttaataaaactttatgatacattttaactaattctggtgaaaggattaaatatttgtttcacccttacctcacaatgtgcacaatgattttaagctcctttctgttaaagcagttaaagacttttccaaagtctaaaatcttaatcacataaatctaaaagcaacacttaaatgcaaacatgagtgaagagcttacgggctttttctactaaaagactttcttctttttctattatagacctatttgaatttggacatttttcttgcacaaataagactgtttcaatacaaatttgaatgtattaacttgctagctcataatgttactcatggtttcagtttgacttgcacattccagaataaatctatttacttaattataaatgggtgtgtgtcattgtccttgacaccatgagaaatataatggctatcaggaagtgggggaaaggaacttagatcttttcgaatgtctactatgggcctgttgtttctctcagttgattctgctaacagcccacctaagaaagtattaatcatgccaagaaggtattatcattattatcttatgaatgaaaacttcacagaggtagctgaatgcctaaaattcacacagctagagtatcttttaagagtccttcttttgcaagtgacaaaataaataagctggcataaacaattaaaggaatccactgactcaaataacagaagcccagaagtaggactagctctctaagaggctagatatagctgcaaaattgatattaccatgaacttggcatctctgttgttctctttggtttcccttcccagcattggccttatcctcaggctctacaagcggatctgctgcagccccagtccccctcactctgacaactatggtgtcaaattggctctagccgttcactagaacgctgtaccgtgttcacaaatgtatcctgcactagctgggggaaaagaggatctctccttatagctctcttataattcctgagatttactcttatcttttttttttttttttttttttttttgagacggagtctggctctgtcgcccaggctggagtgcagtagcgtgatctcggctcactacaagctctgcctcccgggttcatgccattctcctgcctcagcctcctgagtagctgggactacaggtgtcctccaccacgctcagctaatttttttgctaacctcggggaactgtcatacccttgccagtttgggtctgttcctggacctgggggtggcgtcagtcccaccaaacctgcggagctgagaacgggagaaagcgaattgcctaaagaaaatcacaatgctattggctggaaaatttctaccaccgttaagtagtagagccaggattggatataaagtctgcactgtgtccgttatgcaacagaactaacaggacataacttcctccttctgtttacaactggcatctagtggtcagaggccagggacagtaatcatcctataatgcacaatgcaggccacccacgaaaaggcattatccaacccagaatgtcaatagtgccaacactgggaaaccctgtgctatatgatctgctgtggggcatattccctcagccttacaaactgcctccctcccctcttctttaagcagcagctaccttgaggggcctcctttcagttacaaaaatgtgccaaagctcttcaggctttaggatctttgaacattattttcactttacctggatgttctcctcccacccctctgactacagctgcatcattctttccaaacctagccaaaggtggggaagcattgagctcaaagagtattttcttgagaaagactactgattctccagagtgggtcagccccacccacctgtcagtagtgccctgccctcttttatactttaactttgtagcaatgatcataatttcaattagctattgtatcttttacagcaaatgaaaactctaaaacaacaaatgaagacttatttctgtttatactctgagcacttagaacagagtctgtgattaagattggatgtattttagatgaggcaatcaataagagtaaaagctcacaggcttgaatgcagcaagcagtttagggagtgtgctgagtagagcagtcaggaaatatttagtgtagaaaagcatgaacagtaagatggagaagggatggaaggtttctggtgttggatttaataattgtgtaactagtattttctgagtttcaattggaatatgctaactcttctgtgtagatgaagtaggtaaaaccagattaaatctgattttgtttatctgattaagtctgatgggcccagaagaaacagcctgaggcatcacttaaatttgggcattttttataatgcgctgaactcggagccaagtgaactaagatctagagctgagcctaacactaatgtactgttttcattgtgctcttttgagcttcagtctatttgtaaaatgagggagctggactaaaggatctgtgccgccctcctaatccaacactcctcctttactaagctaaaagagagttttggcttgctgagatggaactgtgcaagcattctacttttaaaaattgcaggaggaattttttttaatgcagttgtttgtgaacctggtaataaagaagcagaatattgtgagaataactgaatcttttgataattggggactttaacgtgtcccagagttttgcattattttatacattgaatatataaaagattgggtgatagatagcctaacctcacgatatatccttaagtttttgtgtttttcaataaatccctaggacaaatattttttttccatgaacactctcttaaaataaagtctactatgctttgtcaaagctttgatcagatgaaagcatttatatttctgtttatcctcgtttaccaagattaataggttgctagaggtctgagtacagagtttctcagtcttggcactgttgatatttggggctggaaaattcttttccagggctggggagctgttacaggaatttctaactctaacagatagatgccagtagcacctctccctcccagttgtgagaatcaaaaatgcttccagacattgccaaatgtccactgaggggctcagatgacctcaggtgagaaccattggtttagtgcaaagtaatctcctttaactagagcatactggccagatggatgcaaatattactgcttggttaacccatttaaacaaagttaaatcttgcccaaatgaatgtaaagccctcattgatagttaaatgtatctcactgtttgtcttactgctagatactcttggcacattctgaatgagggaatcagtgacttccttatataggcaacaattcctgggaaatctcaataaattatcagaagaaatgcaaaagaaaacagtctgctgattcagcttgtaagtttccagtggtatcgccttacttcccaaactaaataattctctgagtcctgttccatgataggatagtgactgtgggtcagtgctgtttatgtggttgttgatactcttgtgcctcttttagatagttttctaagagacaagacttttttttttaatgactgttcctctctatgaccctctgccccctcaaggatatcagagtttttgtcttcagcatttttcgggttataataaattataattctaaaaattaggctgaaaagaaagcctcaggtcttttgaaaggaggcagaaatagaactagataagcctttcaaatagttggtatggagtatggagtttgttttttttttttaacagaaagaaaagaaaaaaagagtgtaaaatgtgtcagtgtaatactcacttctgctctcctcctgcttgaaaagatcgctgtagtaattagaatctcaaacggacagtcttagcatctaaagtttgggtgtacttctagcaaacatgcattgcacaagataacaatataaattggccttctgaaagtaaacaaacccaaagaaatatactaatgttgggctgggcgcggtggctcacgcctgtaatcccagcactttgggaggtcgaggagggcagatcacaaggtcaggagatcgagaccatcctggctaacacggtaaaaccctgtctgtactaaaaatacaataaattagctaggcgtggtggcgggcgcctgtagtcccagctactcggaaggctgaggcaggagaatggcgtgaacccgggagacggagcttgcagtgagctgagatcgcgccactgcactccagcctgggcaacaggacgagactccgtctcaaaaaaaaaaaaaaaaaaaaaaaaaaaagaaacatactaatattgcagtgtgctttgctgattttagagaaaggtgctttacacttagtttgtttaagaggaatactgctactcagcatgttttgctttcagtccaaatagagaatccctcatcagaaacaggcttaagtttttcaaatagtttactttttttaaaaagtaggtctcacttctgcttccagccaatatggagtacagtgactagatttgcagtctcatctttaaaaaaactttttaaaatcaggacaaaacatacaaaagaacagttttcatgacagtggacattagacaatggaagatagtgattcctgagagataagaaacaaattaaatgagccctatgattgtcctagctaaatgccttgagaggcatccaggctgtggctcagggaggggcaaaccaggagatacccaacaaacttcttgagttgaagagatggagctgagagtcttgggagaccaaggaggctaaaggtcatagacagagtatcagagaagtaagagttgcaaaaagaccctctgacatcttccaaggatcctcattatgtattctgcagggtagtgattagtgcacatatgtgaagaaactacttgagccctggtgtgagggagatacccaaaagatcatatggaaaagcacctagcacttatacaggacttggaaaacaatgcctgtttccatcaggcagaatggaaaacctcataaatcaaggacactgcagagagtactcaaggttcttgccttagtaagggagggtaattagcccttcatgaaacactgttccagtcttgcctaacaaatcttaaaagcaagacttgaaaggaacaaattttttccaagtcattaaactgcatcccagaacaaagctcaataatatttatgagattataaaaatatccagcacttaagaagtcaaatttatgatatctggcatccaatccaaaattactagacataaagaaaatctgagacatgggactcataatgaagagaaaaattaatccaaatggataggtacagagctgaaacagatcttagaattagcagacaagggcattaaaacggtgatttttaactgtattccatattttcaaaagctaaattgatacctggaagatttttaaaaattccaaattgaacttctatagaggaaaattacaatgtctgagatgaaaaatatgttgaatgtgattaataacaaattagacattgcaaaagaaaatattataaatttgaagacatagcaatagaaattatcccaaataaatggagaaaattattttaaatgaatagatcatcagtggactttggaagtaattcaagctcctaacatatgtgtaattggaatctctgagagggagaggtagacagaaaaaaatattcaaagaaatagaaaattaccaaatttgataaaaactataaacccacagatccaagagctcaacaaacccaaaacacaagaaaaaaacatcaaggtaaatcataactaaattacctaaaactgatgataaaagaaaaacttaaaagcaaccagaagtaaaagatatgttatatatagaagaattaagataaagatgatagcagatttgttatccaaaatgatgcaagatgggagccagtggagcagcatctttaaactactgggggtaaaaaactctttaaacctagaattcaatatgcagtgaaagtatctttcacatatgaagacaaaattaagacttttaaacataaaaaagcagcgggaatttattatcagtgggcctacagtataagaaatatttaagaagtcctgtaggaagaagaaaaatgataccagatacaaatggatctacacaaagaaatgaaggtcactttaaatgataaatttgctatctttccacatcccatgagttggaacatgagggtgctctggatatgtgccaagacatgaagaaggaccaatgaaaaggaccaggtccttgaattactgaggggaatagagcagcctggcaatctggatgacccatctaggaactattattgaaagacaaataaaagtctatgttttcaaagtatctatattttgcagttttactgatactaccaattgtttcttaattaatacaattatttttaaagctgtgaagttatgtctgctacatcaagatctttaatttacttggaatgttttttccacataaaacaaagttgatccagagcattctaataaaaaagacatctttttctcacttatctgaaatgccaactcttttataaatctagcacctacatatgcatggcagcctttctgggttaaatgctccatttgtctatttgtttatatgatgctatccatgcactaattagatatgtttatggtagggcaaatactgtaacttgtcatctttctcagatatatcttgactctttctaccatactgaattttcaaataaattttagagtcaattttttaaaagtaggtgaaaaggttataaggggatgcagctaggtcacattagtttcaacctatctttttatgagttgatatatgcagaagtctccagccccaatacaagggttgttctcagactgacttttttccttacaaccagagtggcaaagagagcctggtggtgaaggggtgatatttggctacttggtaggcatctaggggtcaggtttcctccctccaaggaacactctacattcccctagaactaaggatatcatctcccacttgttatccattcgcttcagttatttggtgtagactgtgtcagtataaccccattactgttatcgtgtttaattatataacaactgtacactgagagctttttcaaggcatggaccagacagactaatcagagagtaaatacacagcacttaatttactcttcagaatttttaatcaatgcctattgactgtctcaagggttgaagtctctattttaactccattttaaaatggagttaaatggggaattcagccaatttattcaacatttatcactaatgttgaatacctgctttgctctaggtactatactaaatgtcgaatattcagcagtaaagaaatatatatactatatacatgtatataatatataactatatattatatatataactatattatatacatgtatataatatataactatatattatatatataactatattatatacatgtatataatatataactatatattatatatataactatattatatacatgtatataatatataactatatattatatatataactatattatatacatgtatataatatataactatatattatatatataactatattatatacatgtatataatatatataactatatattatatatataactatattatatacatgtatataatatatataactatatattatatataactatatattatatacatgtatatattatatataactatatactttatacatgtatataatatatataactattatatataactatatattatatacatgtatataactatattatatataactatatgttatatacatgtatataatatataactatatgttatatataactattctatacgtgtatataatatataactatatattctatacgtgtatataatatataactatatattctatacgtgtatataatatataactatatattctatacgtgtatataatatataactatatattctatacgtgtatataactatatattctatacgtgtatataactatatattctatacgtgtatataactatatattctatacgtgtatataatatataactatatattctatacgtgtatataactatatattctatacgtgtatataatatatacacgtatataatatataactatatattatatataactatatattatatacacgtatataacatatttatataataatataatatattatattattattatatttatagaataatatatattattatatatatataaatatataataatatatattattctataaatatagaatatatattattatatatacttatatataatatatacatagtataatatataatttatataatatataatatatataatttatatatattatataaaatatataaatttatatatatttatataatatatataaatatatataaatataaaaatataaatatatataaatttatatatataaatatatttatatatattatatacaatatagtatacaattattaataactatatataatatacatgtatattatatatagttatatataatatatagttatatatattatatacatgtatataatatatataactatatccttctctgatgggaaaatccaacatttaaacaaaataaacagaaatataaatatttaatttataattatgtttagtgctatgaaaggaacaaataaggttttatttaagaataactggagggagaaagtggagaaaaatatacttttcaagttagaccatattacatacagatgaaatctgatttaacctgtaacataaccagatttatgtagcaaattaaacataaattttttcatatacttaatctatttatttgtgtattcaatagcatttatcttctttgagccctataatgatccagctattaggctcacaaaaatgaccaggactcagttcctgtctttgaggagctcatagtttttttttattattattattattaattagcagtgcctttcattaaaataattgcataccaaatggaaacaaatatgttccttttcctctttcattcttctttagatgaggataggaattcactcaggctccgtgctggctggagttgttggggtgcgaatgccacgttattgcctgtttggaaataatgtcacactggcaagcaaattcgagtcgggaagtcaccctcggcgcatcaatgtcagcccaaccacttaccagtaagtgttctctggcctcctccttcctgtcttggcctttgttttgggctgctatgctgtcatctgtgagtccctgttctttttcttgatcctgtcattctccaagatattatgagtagaactgcccaaacccaaaagatagatagtaattgtgacacaaacttttatttgcactctgtgagagtgcatgaaaaatctgacatgactgagaggtgaatataggtttgtcatttcccacagtctctgtccttcttaagtatacctgtttaaaatacaggagagcaaatgttcttaaggatctgcattataatagaaatctcaatattttcaaaatgtttctgtttataaaaatggaagaaatacaatagaaaaggtggttggactgtttttttgaataaataaataaagtctttaaatttatatatatataaattataccttactcaaaatgcttgggaccacaagtgttttacggtttgaaattttttgagttttggaatatttgtgcatattacctggtgagcatcccaaatttgaaaatctgaaatccaatatcttccaaagagcatttcctttcagtatcgtgttggttctcaaaaagtttcagattttggagcattttggactttgggattttgaatgctctgctataccaggtacagagtaaaacattaaattctttttatcttaaaggtaatctttgacaacactacacatttttgcctcctgaattcattcttattttgtgtctggtagaaatttcccctattagatattaagccctgtatatgggcagcgactgtgtctctcacagtcataatgatgagtttggctcatcattatatccccaaacttataaaaatgtctagcccataataagcactctgtaaatatttatcaaattaatgaataaatacattgataagatggacattttcaaaattaacagcaaagaaaagcatgaaaatgtcttactttatcacactttggctttattctgggcattactgtacagctgcttaattaatttcatgttttaggtaacttagaatcatactgaaaaaaatgtatagtaggaatagtggccattgatttttctattaacatggttacaaaaaactcaagcagaaaatttgaatataaagataaaagttgactataataataaataaaatagtgatattttcaaacttttgataccaaattagagggtaatttggtatcagaaattccagagagggaatttaaagtttttagatgaaagcagatacttccagattctgcaaaatagatgagaaagaaaactgaaattacaaatataaaattaagagaaagtgcacattaaaaatacattttaaagctcttgctaagctcattaaagtagtggataccttgattttacagtttttgaataaagacacacctcttactaattttaaggaacccaagagattttgagggcctcacagacaacttctggacaaagtttcaggattctatctaatcattacttatctaagaactatatgctattttcaggatatttataagaggatttgcatcttttaaacttctcccaattttcccaacacaattctgggcatattacagatgatctgacaacaattaccatggcaaattgaattttgtcaaattctctagtagagatcagtgattctgatactttctgctctatacgatgaaaaaagttactgaagatcagctacctcactcatatcctattacatggttccatttattcccatcatggtattgatacttattttccatgtttgtgtaacttagtgtagatttatgtcttctgtgacaacttcacttaaaaaaaaaaaaaaaagatgtgtaaaagaatgggcccaacctgtgtgaggagttcatgccctgttgcttagacatcataacagtagctggctttgtttacatagtgatgtattaaaaaaaaaaaaaactctgccagccatacaagtctgtgcattttggtggtgactcagagtttttgtagtctttttcacagtttatgatgatccttagtgattaacaaggtctgaggaatgaaatcatttcaactactgcatacactgaagcttactgttgtgttattgttctgcaccttcacccccaggccccccaaaatcaaacagagccatagatagacacgttgagctgacaggtgggtagattcttagaacaaatataatttatgaagtaaaacccagtattaagctcatgagagtttgaaatctctattttatccctgaattacattctgtagaatgtccaacattacctgtttatcttgaaaactatatgattattataaactttggaagtggactgttttgatattatgataaactgaaatcattttttgaattgttcattccaaatgcattttgtcttaaatattcaaataattgaattttaaaaatatttttgtaactattgtggagtactgaaaagataataaaatatccatgatcctaccatagttaaacactttatattttgcttcagatatttcttaataaaaatgaacaaaacattttctttgtaattttctcagtctttcattgtgacatcctaatgagtttggtgtgtttcaaaggcccgtgttttgtttttccttcttttttttgagacgagtcttactctgtcgcccaggatggagtgcagtggcacaatctccgctcactgcaacctccgcctcccgggttcaagggattctcctgccttagcctcccaagtagctgggactacaggtgcgtgccaccacacctggctaattttttgtatttttagtagagacggggtttcatctttttagccaggatggtctccatctcctgacctcgtgatctgccctcctcggcctcccaaagtgctgggattataagcctgagccactgcgccctgcctcagtcccatgttctatatattaactttctacatatgtatccatgaacaatataattttattttacatgttttaattttcataaatggtattttactgtatgactgttatcactaactttggtttcttttaaacacaatttaatacttttaagatctatccatgttggagcatctttctttggaaattccaaagaaagaatgggtttggtaatttggtcgaaggtgcattttgagctgtaactaaaagctgagatagtaatcagtttattcctatgtgtttttattaacaaaagtcccttactgatgactgtctaaatcatagacagctctagctcatcattttaatcgctgtatgacatttcagtgtatgactccaccatattttaatatttcatacatatattcctctgttgatcaacacttcggtatattttctattttttaattatcacaaagtttgttcctgtgaacattatttacatgacattacaaaaaagaaatttttattgagttttaagttttccaaattagacattttcatttttcttcaataaatgtgtttacacacatttttgttcccatcatcccaatgatgggataagttttttatgggatatggattttaaatagtgcacataatatatgcaccattaatatatgcactttaaatagtgcatataatatatatatcatatatactaatattactttactgcatataatatatattttaaaataatgcatatattataaacaactgtcttaacatcatgctgctgatctataaaacagaaataattgcttatatgaaggatggctttagcaaattttgaaataaatgatttatctcagcataattattttttcttgctacagtgcaaactaaaagtgtagaaagacttgaattactttggtatgaaatttttcttaatctttaaacatttttgcttttctcattttacaattgatctacttccagatgttttagaacgcctatttttaattgactgtgaaaggcttctttctgttaaaaccaagcttcttcctaaccactgctacctgaacagctcattgtatgagagcatgtacagtcgagcagattaggcagtggtgaagtgcatgagctcagaatcaaaatgcctaaggtagaatccaggctctaaattttcctgtctacatgaactttagtgacttaatttctttggaccaagttatctcatctctaaaatgggtacatgtttatgaagattattgttggcatttaatgtgatatttttaaagctccttatacttggaacatattagacattcatttactgcttcatcctgttctttccatggaggaagaaaccatcttattccttcacttgaatctcataatttataaatttagccatgatgaatgatgtgtgctagtaggattacagacctcatctggaaatttgagagaaagaatgggtttggtaatttggtcaaaggtgcattttgagctgtgactaagagctgagatagtaatcagtttattcctatgtgtttttattaacaaaagtcccttactgatgactgtctaaatcatagtcatatgattaaaaattggctgtgtacatgggaaattcccaaatttaagctaaggtacataattaattcaattaatcacatgattaattgaattatgtacctctgcttaaatgtgggaatcatatatgtatatctatatacatatgattactaagtaatcattacttaataagtaatcatatatatgtatgtaatcgtatatatagtatataattaatctaattagtaagtaatcatatatatgtgattgcttactaattagattaattacttactgttggcttcaacaacacaaacattattttatagttctatagggcacaagtctgacacaggtctcacctagctaaaatcagcgtgggcgtcatgaggccttcattctttgctgaaagttctaggtgataacatgctttcttgccttttccagctttgaggccactctcattcctctgttcagaaccttcttcttccatcatcaaagccaataatagttcatctttctaattctacttctatcatcacatatcttttactgactcttcctccctcttctacttttaaggactcttttgtgattatgtcaggcccactggataatccatggtaatttctctattttaatgtcatctgattagcaatcttaattccatctgcacccttaattcatcattgccatgtgtattagtcaaggttctctagagggacagaactaataggatagatgtatgtataaaggggagtttattaaggagtattgactcacaggatcacaaggtaaagtcccacaatagggcgtctgcaagctgagcagcaaggagacagtccaagtcccaaagctgaaggacttggagtccaatgttcaagggcaggaagcattcagcatgagagaaatacgtaggccagaagactaaaccagtctaatctttccatgttcttctgcctggttttattatggctgtgctggaatagattagattgtgtccacccagcttgagggtgggtccgcccttcccagtccactgactcaaatgttaatctcctttggcaacactctcaaagatacacccaagaacaatactttgcatccttcaattcaatcaagttgacactcaatattaaacgtcataccatgagacctaacatattcacatttttcagggattgggatgtggacatcttgggaggtgggggttattcttcctacaagaagggaaaatttaaatgctaaaacctgcctggaaatatagccccaatcttacttctgcatacttgtctttgaggatttgaaaaaaaaaaaccatataaattatgtaagcaaaatctagggaggaaaaagaactttcacaaatgagacctctggcctgtaaaggatttttactgggacttaagatatagattcctgaagacaggaatctagtgtaggactgaatgatatttctatatttaagaagcagtagagcccttggcttgagaagactaagaagctatcctgagaaataagcagtttttataaagatgactgcagtcctctcactgcataacctgccctcagacacagatacccacatatcatctcttacaaaactcaagaagttataatatttaatttctctttagacctctagcaccaagtttaaaattgcacagaccacatttttgtgcaagagtttgatacagtgcataattcctaccctaggaattaagagaactgcatctaatattggttaagctatttgatgtcctagatgagctctcatgcatcttttagctccaatatctcatcatagtcacagcaaacatttattgaattactgacaatttatttatattgtcatttaatccttacagcaagagtgtgagttctgaattgtgattatctttgtttttcagatgagaaaaactgaaacttaggttaaataagtcactaagaacattgagctaaataagtgcgggagtcataattcaaacccgtagctgccctactctaaagcctgagatcttatctgtggccaagctgtcccatgggttgataactacttgaaataacatggaaaaaaacaataattactttttaaattttttagctgacacattatagtacatgtttataggatacagagtaatattttgataagtgtttacaatgcataatgattaaattaggataattagcataactatcacctcaaacatttatcatttctttgtgtgaggaacattcaaactctgctcttctagctttctgaaaatacacaataaattatcattaaccctattcaccccaagtgctacagaacaccagaatttattcctcctatctagctgaaattttgtatctgttaacttctctacattgtctcctcccccttacccttcctagcctttaatacccacaattctactctctacttttatgagcacaaattttatttttttaaagacccattaatttctgaatattactagcctcgatgagaggatttcttctgcaagaaaatggtgaagagagcagtggggagcaaagtggaattacagcaagggagattcgttttctctttgtagatataatgccctcaggttgaacttttgctattctggagttgtttttatactcaggataataaaaaggaaggatattatttctaacgtgtttatttggagtgtctgtatttctaactatattagtatctctgtctctagctctgaaatgaacatgagtatatgggacaaacttgtggcaagtggaagcttccaagtgaaaaaaaaaattgtctgttgcctctgtgaggctaaaaaacattttgtataagcatgtctctaatgcatataataatttactgggaatataggcttgcttttaggaatttactttataaacaatttggaggaatgcatatctttctggtaaattcagagaaagacgaatggaataattgaagaatgatgacattccttgggtatagtttttatttcattaaactataccttcgatatagtttaataatcagtaatactagtcaaaaacactagctagaaactctgcttctgttcctttgtcaatataattattatacaaggatgagatactatgttataaatatttactcttcttcctatggacgcttaatgtggggaaagatccaaagaaacttcaagaaattcttatctagtagtttttctgtagccttttcttaaaaaaaaaaatcaacatgctcatctgcactagtgatttgatatttaaaaataaaaagtattcgggctggcatgctactatccttcagtcttttaaataactttattaatcatcttatccttttctctatggaagcaccaaaacagtaaacatattttacaaaagaaatataatcagtaaagacaaatgacttagtagttttcccaaaaggataaactggagcggtgcctcaagaattacatttctatttttccaattacaaacagcaacattaatattacccttttaaatgtgccaataaaagtcatatctagcacaattgaatgagatattctactcatttcaatacttctttttactatctctttctttgtctctctgctatatatcaaaaagcattttccccagaaaatgtaattctgtggatcaggaatctgatgccttcccaattttttaaaaataagtctgtcttttttgggggtagggggattttagaatattccacttcagtcattccatatatttaccagcatatttaaggccattgcagtgaagtctttaaaaatcagaatataatgttgcagttatttttacagtaaaaatagtaaaaacttacctattagcttactcttaaaggtctaattgctaaaatttgtaagaatcaatgagaaaatatataattatgtactttgcaaaagtggttggttgttttcatagatatgaaatgaagagtatgtctggaaatttaagacatatttttccctgggaggccgaggcgggcggatcacgaagtcaggagatcgagaccatcctggctaacatggtgaaaccccgtctctactaaaaatacaaaagaaattagccaggcgaggggacgggcgcctgtagtcccagctactcgtgaggctgaggcaggagaatggcgtgaacctgggaggcggagcttgcagtgagccgagatggcgccactgcactccagcctgggcgacagaccgagactccgcctcaaaaaaaaaagaaaaaaaagaaaaaagacatatttttctttatgatttagtttattatttggcataggtttggcttatatgattaggcataagattaaatctagaagtaaagttttgctgtttttctttaggtcccattcctaactagtatgaagggaaagcttggtggttctctcttctcatgacggcagggctaaaaagttaattacctagttccaggattcagaatttaaaggcattaatctggtattcatgtcgataattcctatttatatgggagacatctgttaatttcacacacagaaagaatttccttgaagtataaatactgtgattggcaactctgcttaaatgtgggaatcatatacataaatatatgtcataaataacgtttacaaagaatgccaagcttaagtaaattttccacattatctaaaatactataaggtgaaaattagttactaaggtaattaagcatgatttaaagcaaaagaaaaagtcactccttacattttcctttccctttctccattaaaaatggcaccatttctagtggcctggaggtcaatatttattttgtaattaacacagctttaataatcctttctgaaggttcttttagatgtccacagtttagctaaaaaggccaagttctttagaaaagtaagtgttaaacatgtttggctgtggaaacaattcaagtaatatctaactcaaaatccaaggtagaacatagataaaagtattactgttgaggattttgggggctgctgttacatttaagccttatgattagtgtgtttatgaagcattttctttgcatactcacatgtgcttgtttctggaaagagttttttttaatattctcatcagatttcaaaatggaccgtgattcagaaaatattaagaatcactactgactgattaaataaatgaatgaccaaataaaataatgtgaatttcatattcctgttctgccactaattagtttatggccctggataagccacataaatgatctcatctttcatgtacttataaactaggttaggtctagataattctacaaatattttgtactaaatcctggaacagaaaaagtagcattaatagaaaatcagtgaaatctgaataaagtctgtaatttacttaatagtaatataccattgttaatttcttagttttgacaaatgtacccaggttaagtggaatgttaatattagatgaaattgagtaaagaatataagagaactcacttcttgcagaactatactatatatctttgcaattcttctatattatctttgcaattcttctataaatctaacattattccaaaaaatgcttatttaaaaaattattatagttctgacatccagaccaggcacagtggctcatgcctgcaatcctagcattttgggagtctgggggagaggatcacttgagttcaggagtttgagaccagtctgggcaacacagtgagaccttgtctctactaaaattaaaaaaaaaaaatccccagacatggtgcatgtgcctaaagtctcagttgctcaagaggctgaggcagggggatcacttaagcctaggagatggaggctgctataagccgtgatcacaccactgcactccagcttcagcaacagagtgagaccctgtctaaaaaaaaaaaaaaaaaaattctaacattcagtgaaagctgtaaatttattttcaacttacataacagaggatcttatatattattagagacccactgaatgtttttgagcctggaaacaacatgatcaaagaaaagcttacttggaagtgatgttccacagggagtggagtagggaacacctagaggtgaaatgaccataagagaagaggtcattgttgttccaagcctaaggtacagtcatgaactaaggccatgatcatgggaatagaggtatagaaggtatgaaaaaactttaaagaaataattgacagggctgactgggcaaaaacacatagccattctatatattgtatggttaatactgtgccttgaaattggaaagccatatttattcactctcagaattaatgccttatgaatatatttttaactttaaagttcttacttttaggtttagcatgtaatcaagcctctatatcgttttaaatttctccttttttctaattgtgtgtacattgtcctttgaaggaaatggcaaaattttatattatattgtttgttcgtatatggtactatgttgtattaaggaaatatgtttgtttcaaatcctctcaaaacaggaaggtagacttttggaagtctaacttccaaaaagctgatcatgaattgtattatttaaatacattttaatatttaataaaatacagcatgtttggagtattcgtttttaaactagagaattgaaaccagtcttaactgggccttaatcttttagcagtcagttcttcccactgctcttttgtgtgaaacactgtgcatcaggaaaaatctgattgctctaaatgctatgttaagaatcctttctgcagctcttattaaagtgcaaagattctcatgcattagtcacctattactaaatcaaaattgctttgtaatcagtttttgtgatattagccaacatgacagtgtttcctctggagatcttacttgaaaatttttcagatttgcaagtctaaaactaacatgtttgatcacgctgctttgtatgatcctctataaactgaatactttataaattctcaagcttccctaaatgttagagctgtaactaatctttgaaataaattagagtaaaatctttctttttccacaaggaaattaagaaaccagagaatttaagcgacttaactaatgccatcaactaatttgtctctatctaacctgtatgggggaaagaaaaactctaaaatgtaagagattagatatactgagcctacctatacctcttctcctctcttagtttctctccacaaaaatgagtatttctgagaagcataattttagtggaatttgcaaggaatattttctataaaacattgttcatataagaagtcggttgaactcttaaagaaaaggaaaaaagtatgccctttttttagcctccaaatattttcctaggttgatttgccttcttgggggctgaagttattaaaatttgcatgatctccttagaatacatttaggctaactatttctgattggttgaataatatagaaaatagagaacatagaattcttaagtctaggaatctaatttggtactaatttttaagtaatgaaatcaactaatattaatttttaaaaataattgtgcatattttcttctttccacttctttatcttttatacagaaagaccagcacaatgatgaacttgtttttaagaaagacttttggtcagagaagtgaaaaatgtgaggaaattatttaacttacaagaactggttacagttatcttttctaatctctcacttatctctttttaaagttctgtctatagacatatcaaacttttgcatgaatgttttaaagtttaaattccttgacatttactagaagtggagtttttaggctgttaaaggtcaaaattgacagggtccagagaagtcaatggggtagaatgatctttagttatttagcatcctaaaattcaagaatgtaaagggcattagttttgccactcaaataggaacatcccagaagatgtacactctctagcaggtatcaggtatgcagagtatgaacctatacttaagcacactttgccatcagtacctactcctggggtgggttgcagaaaaaatgtgcaggggtgtcgctgaagtgcctctgagactctctgccttatcattttcaggggacatacaggaaggctatccctttaggagaacttattggcctgaattttagatcccacagattgcctcaaattataaaattacctcaacatctacaagtaaaaatatttgcaaccttaaaacgcataaacatttggtgagatcctttttctgttttatttcatcatgagctagattcttcctttccttatttggaaaggtgtatttccagagaatgaatcactgcatttcaggggatttcaggctgtctagccgactcaataacaacagttccattggacctatcttcagactgcatcagatcttggagcagtgaagcacaaagcagaaatacagggcagagttccttcctttcttccactcaagtagaaagaagaaggtaaataggaaaaattcaggaactttacaacacttaggaaaacataatgtgtcttgatgtcttttattttcatctttcagaaccgtcgtccttctcctacacccaaaaatgcagtgcccaatgctattacaatagaatccaaatgcattccttagcaaaaaaagatattcagatgaataatttgtaacaacagaaatttctaattaagcaaattgaggccctgagtttatcattacccttttcggaagttaataattaatcttttttgaaacgacaacaaaatggcttccagatatcactcaggtacacacttgccaccgtcctctcttccattttgttggaacaaaatgacatatacacatacaaacacacaaagactggaagaggatttaaaaatggaagagaggaaggtggtaagtgtatgcctgagtgatatttggcttaatgtctaaaagaaagctgaagtctcaggtcctacagaagagggagtgggtaagaagcaagtatattcactctaaatctaaatatcagcctgtttacatgcacacatgcatgcacacacacccaacctaattaggaggataatctaaaacatccaaaatatgaccaaaagagattccagaaaaagtacaagggtagaaaatactctagggtattttaagtcagaagatatacagggaataatgtgcttacagaatcatgagaagagataaaaatcaggttctaagctggatatcttgaaatgatacccataaaatatagaactggccaggtgcacaagctcctacccctgtgctcaccacgggaactgtaatagtctaggtcaggagccgtggccacagccataccagcctttggacgtcaggaaactgaaaaatggatgcctaaatatgcattcccatgattatgaagttagatgttagactaacgtgtcaccagtactgggccattttcttgacacttaggaagctaaaaactggagcctgcttctgcaaaactccaatatcaatagtcactgttaatggtcagttgccaagggaaacggaatctacttcacttctgccattcaaaactttgtcaggtcaatcttattttaggagcctaataattactcagaaccatagtagctagggaaattgggaaatgtagtttcaagctgggtagccatgtacttttgtagaactttattactaataaataaagggagaacaaattttgggtcacagctaactctagaaagatatgagaggtttgttctcctgagacattgaaccagaggaattctaaattcaggaaggtaaatatgggaggattaaataaaagtctacattcataacagtgagattcccaggttatttcctaaattcaacttccagaatgctggaatccaggtgtaatcccataggaatgattggaatattgttacttggacaaactggaccaaaggaaaaacagtaaatatattgatatttgggaaccctaatgaaatggtcagggtaaacctacaattcaacattattttgctacacacaaaacttctaaccatgtcataatgacttatacttaaatagaaagatatttacagacattagtaatttgttgaatgccttgacatgaaaaaagagaccaaaacaaaaaagcaaacaacaaaatctagtcaattaatatctagaggaaaaagagacaatatagagaactaaagaaaactataaaaagatgattaatattctcatagatttaaaatagtaagaacacaacataagaaaaaataatcataccacaagagtggaaattaaaatgagatatctgaaattttaaaattctttatgtgttgggaaataatgttggatgcaatcttccagaaaatagaatgttttaaaatgagggaataattcgagaaaaaggaaaacaaattagaagattaatttaccaggtcaatgtctgactaagccaaaatgcataaaaagaaaacatataaaacaaggcatacaaaattattaaataactttttaaaaattcctagaactgaaagacatagtttgctacgtcaaaaggttcaaaaggatccactaattgtcattgtaccaaataaaaaagatgcacttagccatattattattaattttcacaataccagagatagaaagacgacgatgatgatgatgatgatgataaaaaagactaggagaaaattcacatgcccaggattaaaaaacagaatgacatcttactttttaacagccaaatactgaggagaaagtcaattctaaagaagaatttaatacctaattaaaccaatcaagttgagagaagaatgaactaaagatatttccgacatctaaagtctttaaaatgtcactgtcctcatatcttttctacccctctacaagatgcatcagattctactgcctcttcctttgcccttcaagtatcgcttggtgagcagtagctgggtagtgagtagacaaatttgtgattaccccctggtagacagcattctgagaatgtcactctcttatagctctgcacattacacagatctttccagttgttgaaacaaacaaaagattttccaatttcacacagtgatttcaaacgtgcagatgtcagagagctatatatactagtctgccgctattagaggctggaactggatctattcatttcagcaaggtttattctgtccatggggttgtccagggggcaaattcgcaaataaaaataatcactttatggaaagacattttcagcaaaactcaaaattctcttgtttccctctcagtcttctcctgtcccatacatattatcgtcagagataggaaagtatcggttcaggcctagctcacagaaggcacttaatgattacctgttgaccagttgactgctgaactcactgacccttttttaaaattctgtgttttgtgttaaaatttgaactacatttagatcatttgtacttcagtatgaataagtgtcagaccctttcccaaggtaggatgtaggacagagcacagagcttggtgaaaattggaggaaatgagcataaaaacaagaggtgagagagtcagaaaccagcttcatttctgcagctgtgatggagaagctccatggacctccatggaatcaagcttcctgcacatgcttgggagccatccattgatccaaagcagcagtggatttttattttgaaaaacaatttgtagaaaaaactgttgagcagagaaagggtgacaggcaggtaaactaggatttgtgtgatttccaaatgcttattaaacatgttgccaaaactcccagagtgtgtaacaaccagctggggattacagctggggattaatttagaggattaatttagatttatatagaatctaaccttccatatcagccctgaggtgctaaagaaatggattgttaggcagagctttagagccaacccagggacttggacttaataaagcatttcagaggggatcctaggctctgggatgatcaggttctaaataattcctaatccttgtatacatttgattgcttactcagtttcagcaccatgactcatatcatcaacaggcatgctgtgtgaaatgattcccctgacctcctccacaaaccccccagtaagtcattcagattgtcctattggaagtcaactgaatattgcacttcagtgttcttatctacaaagtctgctgtaataaatactggatatcataggagcttgaatcaatttatccttatgtgctctcatttttactattgaaatttaaaactgtatttagtttatggataccaaaatgtttactgggaaaagcaaataccatttcataaaaactgttgtctctgtaatttctagcaaagtacatgagatctatttaaaatgtcaagagatcaattcattgtgaaaagtttcctcccagccaatgtgcagtgaattatttaaaagttctgacatctgaagcagctggtaccatcttctttcagtcatttacaagtaccttcatagatctaaccccatttttgttttgggttgaaaaatctcaattatagcaaaacaaagatcttggtgagacaaactgtaaacgatacatttgaggacttaaaagatagggagaagagagtgtagctcatgtgcagtcctaattgttgattatgggctttaaggaaactttgtggaaagactgaactatggctatatgtggttcttaacttttgtacttaaatccatagtcatcatctctccctttctcctgtagaatttcttcctttagattgtatcagatgttgtatcattgtattgctaatttgtttcaatgagcatttcttgtctttttagttatattaacttattctgcaagtccccacttactcgtctccattcagaggactatttacaatgtcataaccactaaaaaaaagtttgattgattgacatcaatgattgacacctatatattacacattgatgactgttctatttgagcttagcaaaattgttgtggaattcactgctaaattaaaactgctgtatagagctttttacattttatttctgaagtgactgattatatattaatagtaaagaaaattgacatttgtgaaaatgaaagtaaaaagtactgatgacttccattcttattgtcattaattatttcttagtttagttgttttgtgatggagagctatcttacgtagtcttgttatttattgttgggctaagcttgactgtgtttacaggtctaggttccagttccattgtcactactgtcttgctgtttcctggagcaattcagtctaacttattctgaactcattttcaccctctataaatttggtggagatgagcatttttcagcttttaagttcaggggtacaagcacaggtttgttacatacaaatgtatatacatacttacatacatttgtaaatgagtgtcatgggggttcgttgtacagattattttatcaccaaggtattaagactactgcccattagttattttcctgaacctctccctcctcccatccttcaccctccaccctccaaaaggctccaatgtgtgttgttctcctctatgtgtccatgtggtctcatcatttagttcccaattataaatgagaacatacagtatttggttttctgttcctgcattagtttgctaatgataatggcctccagctccatccatgttgctggaaatgacatgatctcattctttttttatggctgcatagtattccatagtccgtatttaccacattttctttatccagtctaccactgatggacatttaggttgattccatgtctttgctattgtgaatagtgctgcaattaacatacacatgcatgtgtctttataatggaatgatttatattcctctgggtatattcccagtaatgggattgctggatcaaatggtatttctgtctttaggtctttgaggaatctccacactgtcttccaccatggctgaactaatttacattcccaacaactgtgtatacatgttcctttttctccaaaaccttgccagcatctgttatttttttactttttttttttttttgagactgagtctcgctctgtcacccaggctgtagagcagtagtatgatgtcagctcactgcaacctccacctcccggttcaagtgattctcctgcctcagcctcctaagtagctgggattacaggggcgcaccaacatgcccggctaattttttttgtatttttaataaagatggggtttcaccatgttggccaggctggtatcgaactcctgacctcgtgatctgcccaccttgtgagcctcccaaagtgctgggattacaggcgtgagccaccgtgcccggcccttggctttttaataatagccattctgactggtgttaaatggtatcttattgtggttttgatttgcatttctctaatgatcagtgatgttgagctttttttcatatacgtgttggcttcatgtgtgtcttattttcagaaatgcctgttcatgtcctctgctcactttttaatggggttgtgtttttttcctgtaaatttatgtttcttatagatgctagatattagacctttgttggatgcatagtttatacttttagcttttgcatacaactatattatgtgaataaaatgggataaggcttttgaaagaattttgaaatgttagaaggagacttgttttttatataccgaatgaatatcatcattttgtggttttttttaactgccattatatcctttagcaatcaaaatactatagctctagtttttaaaattaaatatagactgttcatattataacttattagtactaccaactattgttttaggtaatattttctatccattaatagcattcgaggaggaatattttcttcttctccttagagatactcataattgattgtgcaatgttcttatctgttcacacatcctttattcttcttgtgctcattgtttcttttgccccgacctgcctcctacttggagctgctgctaacatgaatctgtcttaggaggatggattgtttttaagaaaaagataatgggtttggatccaaggtgctttccaaataaagtctaaactcttagtttagggctttaaaactttttcctaacctactgccccagccttaaccctcattcttacctcactgggtaatgctatcatatggttagaaactttacaatattcttgtttctaaccctttggttacattgttttccttatccacttgttgaaactgtatatgcctttaaataacatctagtccatgaaagctttgtggtcctcccactgcaaatactttttttcttctagacttctgcaattttcgtgtctacttttctgatggcatctagcctattacgttctatactttgatattactctgtgttttgttcatttattgggtttttttaaaaattcttttattctgtttctatatctgttgacaaaactgtgagctttttagatgtgttccacttcttatattcacagaagtgtctaggaggcttttcttgggcaataagaaacagtctatcaagagctgttgaattaaattgaattgttgggccacacttttagatacaagtatcaaactgaacctttcatgaaactggacaagtttaaagaataaatttattccaatgttgttagtgttttgaaaaagagtctttatgtgtgactggaagagaagaatcaagctgtttaaccaataatgctatcgagtttggatagcatgcttggctagaaatcagcaagcagatatcagagacattgggagtcacgaagtgttgttctacaaagttaaatacttgattaaagttttttacatacaggacacacatttaaagcttacggtttaccaaacataaaaggagtgcactagaatttgggcaggttttaaaaacggaaaaggtaaatcctgcatgcttgaaataaaacctgtattatgaagtttccttgggcatttgtttagggaaaacaataacatttgaacaaatattttcaaggaatgctgtttagaaagaaatcaatcttgaacaaatattttcaggtagtaccatactcagctttggggtttttttattattatcacatgaagggatcttttctgagttataacatttcctagcatttggaatctgatgaaggccacatctatacaaagaaatagaggtattaccatgaacagtcagagataggcttcctgagcctttaaaatttctgtccatgtatttacatttccctggcctacttgattcatgtgctctgtattttcttcttagattattaaaacgagaagaaagtttcacattcattccgcggtctcgtgaagagcttccagacaactttccaaaggaaattcctgggatctgctatttcctggaggtaaggactggtccaaagccaccaaagccttctctttcttcgtcgagaataaaaaaggtttcctacaacatcggcaccatgttcctccgggagacaagcctctgagacctgctacagatcaaagactcctccaaaaagcacaagcccagaacatgggtcaccaatggggggtggaaagagattgtgtctctttcattgctttgttgagaacaagcagcaaaatttctgtattatgtcaggcaataatcctactaaaaggtggaggtgaccgctgtcaataaaaagccggaggatgagggaaataagatgtgtccattcatatgagtggttttggtcatatatatacacatatattttaattacaagtgtgggtcccctttcagaactaaccaataaatagattccatgttttcttgtttatcacacatacaagtatctttccctatatatttgtaccacttttgagagccagttttgattatatattcctacatttagtgagttggtgggtgaggaatattttctaagtttctttttctgaacagacatttcatacatgtatcatggcagtgtggtaaacttcccaactggaagaattgtaactcggcaaaatattttagggatattacctatttttatacatatctcttctagataactacatttcgcacaacattattagattttcagaatctgcttctgtattgttagtatattatatataatgctaacctattaatctaatatagtttcccttatttagagagatcagtgcttcgactgagaatacatataaccaaggatttcagataccaagaaagcattatatgtctgcttagtaaatatatcttttagatttaactaatgtagcatggaatccagaggaaatggaatttcctaacaccagatgtatctgtaaccaagattaaagaaaggtctttttgccaccttctaacaaatatcagttaaaatgaaatgctttgctacactggatccttttcaacttagcacttacaaatataggtagcttttgcaacactaaactgcattctaataaacagcattcagctaaatgacatgttagttacccccttcctcttccccagttgatgcctcctaagagccgactgctattcttgagaacaaattcctggatactggcattagtgacaaagaagtgtcaggacagtttgccaagaatgttgtttcttcttgtacaacacaaagcaaggaaacctctgtattttatggctttgaggttttaaaaaatgttctgcagtttgattgatatggcttttaaattcagtgaatcactttcatgaatactgaagtaggtataatcttcagaactagtaatcattatagttacagataggattccatcgcatgtcctgctcaaatgaagacctgttctcattaatcaatactgcatgaaaatattactggctcacactaaaattaggagcatcaggtgtccagagttttcctgtttgggttcagatataaaatctaagtttctattgaggttaataagctggaagcatttgtttcctttaagccttggagaggtcattttcttactcattgatagcttatgtctactgaatgcaatattcttttctgttcagggattttggctgcattatgatttggttatgacataactcagttaaggaatatatttactaatttccaatgtagtctatgaggttcatttaatgtttttaaattttctatgtgtgtggctagaaggcatttgtagatatgcaaatatttgttataatcctgatcccttttataatttgagttattttcttgccctgggggtttacaaggacacgagtgcaacactctttatatggagaagacaggaaatagaccttgagctctaaacctttgcctgaccccctcttctgtgggcctgtgtttctggacaatggggaggtttacagccagtatgagcagagcagactgggagcacctcaatcctcatgcttatattagaaaatgccttagcaatgttgatgggctccttgtagcactggagcatggggagggaacaagctcactgatgtcatttatgcctattgtcttcagtaacttagaacttattatggtatattaaatcaataaaatgttggtgatgaacaatgtgttttgtaaccataaggctgaaagggacttccaggaatatccaatctatttctctcactttttataaagatttgtctaagcaactactctaaacacatatttattatctccatacttaagaatatctacgggaagcatatttgaaaagcatcattggaaatccacctcaatactagtgataggcctggagagaagtattgtatttatatatctcaatttatcagaagaatcacaaattctgtattagtttatatgattttacttagagaataagtatccatttacattgccataaatgtcacgatgaagaacgtgccagagatttcttatttatcactgacaggatgtcaactacatttttcatacattataacctaagtgtattttcacagctatagtccgagataatggtccaatttgttatcattttgctaatctattatagttgattattgtagttacaatgttgctatatatgtttatgaggtactatataaaatgtctgttcattcaaacttcaatcacagaagttagaagatggagaaaaaattatatttttatttgtcctacacaatgccatctacatctcttctcttaggaattgtgattgtaacaatgtggtggcatttgttatttcatatgacttttatctatacagtattctcacttacttacaaactattaccaacagcatgcattttagtatggcagatacaagaaatttgtgtgatgttcccttagaaaccaaatgatattaaattggggaaatggttttaacccactctgcaagggatactttaaaatataatttggcacctatagctcttgcattttaatattcttttaagctgctgtttggaagaaggcaccttataactagccattagcaccaaagcatcacgttggtatcaggattattttgatggagagaatgtcatcatttgcaaataaatcagttatctaacaaaatcagaatcccccaatatgtactcagaatgtactaccctgtatcttctttgtggaccttaatcattaggtaacattggccataataaaaaataataatatgcttcagaaacatagtagttggatctcttgtctatataacgtagagaaggggaagaagacatagcttccaggtaacatgggacccaattgcgtacaatctgcctttatattcatctcttgctctatattttaagtaatttcagattttccttttaatatctgattatgtggaatcaagtgagctttgatctgggactctgagacagacattgatgcctgagacttgagagtgggtctgtaggttcagcacttcaaatgttgtttcttacagtcttgcactccttcctcttgtccagtaacaacggtgtcaggacacagtagtttagtgtgaatatgtgtgtctttccaggaaaaacaaagcaaaagaggataataacaacttaaacaaaatctcattcacaaggggagcaagacttttaattttgcaaatgcctccaaagagttccagcaataaagcaaaattaaattgatagataacaaaaggcaaagccatggagaattctgaaaaccccaccaggctctgtgttttgtatagaatcatactgctgctgaatgaaattgtgtatctaaagtcgtaaggcatcaggtaggagctcaaaattatgaccataattaaatatatttgttgaaggctccttgggtccctgactttctgagagcaggtgttgtggatggttaaggcaaaaagtaaaacttttacacacaggtttctgtcttgtcattttgagaatgactcagtccattctggaccctttcttactccattctgtcactagaaaccatctcaccccctcacgcctggccacagcaaacagcattctctcttcacttctgaacccagaatggctacagaaagggttgctggtgcctcattcaggcggataggaaggaccacacacagtcaggcctgagcaacaatgtacttctgaagtgtagtaatgaactggatgtgccggggcattgattatatctgcagcttcaccctctgctctttcttcaaaacacagtctgactccaagcacttcatacagcttcactgaatgttcctttgaaattaattataaatgactctgaataggctttgggtagcaccaggcgtctttcagctgacaatatctagaaactcaagttcaagaaccaagccctatatcgtagcttagttttttctactattagattatagaccttcagctacaaaaattatgtcatttcagaggcttctataatcatagcttaataatagatataacccaaaaatcatgatgcatgagactgaattattgaagtttaacatatttctaaacgatttatgggcagctcttgatatgaatgttcctaaaccacaaccagctggtttaacatacacataaattgtgttcatgtgattgaacaaaatttattgttaaatgggtaagttgacctcagctatggactcaatttcaagatcctcgtagtggtgaatgaagagcagacactgatattacatacagattaacaatcttgtcaggctatactgagatagtgtgcaaaattccttcctcacacttgatccaaacaattgaaacctgcgtatgactgttcttccatcccttgttttcttccttcctttgttccttctttcctttaattaaaaaaggtcactgatacatttataacacaggaagtatcacagctaatcccatattctaaaatagttttataaagtgattaatatttttagtttgtgtgtatgcatctgtgtttattgaatgtagatgtttcatgattgaaagaagtaagtttctttggaaggacttgggaatgcagagaagtaaagtttgtgtctttatttctaatatgttataaccagatcacggtttcagttaagtacctcattgccatcccatccttaagaaatgacctagttcagtggttcagctgatctgcttggaagtatctggctggcttcataagaattccgtagggagttttaggaatacagaagactagtctttaccttcagagatttggattcagtaggtctcaggtagggcctaggaatctgtgtttagaaaatcactctaagtaatgctaatatacagccagacttgggaatcattgaaaagtattcaaataatcccaattactaggaataaatacaagttgactgggatagtgatgttatttcatttgtagttattttgaaaagttaaatactctaggcctcataccattatttctttcacaaattttaattttagctttgatttccaatttgtggtcttctttctgagcatgaatcttcaaacttagagacagacgtcaacactgataagcatgagggatgaatattgctcactatagggctattaggcatactagatacagtaccattttcttagttactgccagagctgtgcagtatattacaacatttgctaatcctcaccaccgaggtaaaaactatgacctttgggacacagaagcaaatatcaaagtgacagccttacttctgaatgctttgatttttatgtcatgaaaagacatcaacttaatacttagtctcactatgtacttttcatattgaattgtacattatctgaaaactgatttccaagcaataccgtgtaacaacctttcaagcaataatttaagccatggtgatgatgccatatgaagcttgcacttctttgcatttcatagagcctttgtgaaaacagaaacatgttttatacaagcaataatatagctggtgtggactttttaaagatactcattattctgtagcaaaatgagcagcaagtaatgactcagattaaaaatattcgggcaaatgacatgtttaatctatctcagaagttattcatttgcaaacatgctgtaaagtgattaatatacatcagattatttctggtgcataattttaaacatggctataaaaatatgatttctattcctgtcaaagagatttgtgtattatttataatgttgcccaatttttggatctttgtagtatataatagtaaggaagaagttaaggatggataaatgagtggaagtagagcataggttggaagaggtgattgagaaagtaggctttgcaaaaatatagatgggtcttgcggcagatttattcaaatgttggtttgatatggtcttggaagatgaaagagtaaagataaaagagctcattattactgttttcaatgatagctacacaagtttttggtaagtatgatagtattttgacttcagaatatgattgactgaaagtcacctgtagcacaataaataaaagtctgaaaatgattattcagtaatactgaaaaaacactaaagctttcagatttcgaaatgaaaaaatcatgtttttagtctacttaaaatacaattttaatagaatgtggcatagtcaatgataatcagttctttagtagttaaatttacttcatcatttagaataatgtataaggattacagctaaaatcaactagtaaatttatgtttatactgaacagtatctaaacatcagattatgatttagcatataagcttaggattcattcctaagcatctaaataagatgacagctcctattattgccctgcaaggtaaacaatcccctaaacatgaatatgaacccatttgaatggtgggtgtgttcgatattttgtctttacctttctattactcatagcaaaacttaattttagcattctcctgcccacagtttggaaaatttccctatcaaaatcaaaccggattgttgatttactgaggctttgacaattatcctcttgtatatcactggatccttaaatccttagtaagaatggttttgggttaaataaataatggaaaatatttaatttgaatctattaaattacactgaagttatccttccagttaattcagctagttgctgatcagatcattctttatattagacttaagtattgttgcttattatttaaaagcagaaaagaaaaaccaaatggcaggtctgagtaatagttactttttgattcttttgatacatatttttaaactgaagaaatcactttatattcagtcttcttctgtggactttttgctatttgcagataaagaaggaattctacttaatatatttttactgtggtctattaaatgtcattaaacctatatctaagaggaaagtaataactgaaataaaatcaggaatgtgcaaaattgtttcttcatacctcactttctgaagacacttctttgcattctgctgcctggcatttacacagcagactcaggacaaagggacaaatggagtgagtgaggtgggcaggagctttagaagagatgaagcaaagagagttagttttttattcaggaagatgtagagactcttaaaggagaggcaatttccgtaacaaacacctctggtttaatggaagccacatgatttatttgactactggtcactcatttttaaaaagaaaagagaaagacaaaaaaagagaaacccttcacaagccatttttagttttcctaggaggtagtgccaacctctcggcagctgcacatctcagtgaagctgggatagaagcttacagagctacaaatagatgctttctgaaggtggcagatagaactagtcttggttacaatgattaaggtaaatgaaagtgtcagaacatctgggttgaaggaacaaagaaggcccaataccagctctgccatatgccacagaaaaccctgctaaaattagcatagaaaaacagactaacactatgcaagtgatattaaaacaaactatattttttccttttataacatgcctggctgagctagcattcagtgagaagaatatacttttgtcttatgaatcatttaaaaacatttgttgttgttctgacattaaataaattacatattcccttagttgaaaaatttaatcacaaataataggaaatatttattttgtgtcctgaaatttttaaacttttggcggctgtactctacgccatattcttcttcacattcttctcaaattgggtttggctgctagcaaaacaagtgtggaactttagagcagaaaaatgtccatctgtctcttacagaatgtgccagagtatttgagctggagagagaatcaccccatagcatttaatggtattctgtgagacacgaagactctagtcttctaaacttaaaagtggttaggtagtaccttaatcatcaaagatttttcacttacatgtaactggttaattcatatagagtttgtttagaacagaaactttaaaaggagggaacaaacctgagcaatttttaatcaaaattatcagttagaaaaagaatttaagacaaagatttattgtcctgaaagagtcaactcactcatatccaaaacttagaatgtcagagacttttgaaagttttctgaatgtgtcaacttcttcagcaatgagagattcaattaatgttgtttctaggttccttagagttttatcctctgatgataacacttaattgtgaattacatttaagtgatttttactttatattttccatttgttacagaaaaaaagtcataaatatgacagacttaaaaattgtggcattgagccagggtttgcaaatttggcaatattattttacttaaaatattacactttttaaaataacataaacattaaggataatagtcaaataatactgtattttcagcttgttcacattagaatatagaacaacgcattgtaaacttctcggaataaaatctaagtcaaaaccaatttatgttcaaatcatttgaacaacaaatatgaatattgttacatcacctctgactctctgactagtaagaaactatgcatttccatacccaatgaaacctcaattcctacagcaattctacttttattgcctcccaagaactatttcttcatggtcaatatcactctttaaaagctagcaaaatatgactttcttctgaggtttgggcaatctggatcaatatttatgtatctaaccacttgaaaggctgtctccttttttggccttttaaattaaaacttccataaaatgaagcaaaatatgaaaacagctagttgatttatcaataatgtgaaaccctccttctgaatttttttggtaaaaattaccacactgaaaccaaaacttaaccttggcttggactctcagataaattgcttttgtattctttgactacaaagtattctcaaaaagaagaaattatttctgatggtagatcaaactctagccaagaaggtctagataaactagaggactgtataattatctaaagtaattcagggggacttttagaaaaattctttaatttttgttcctgtgtaaaaattattattaatggatggcagcccaaattactattcttcttttaaaatttgtttcaagtgtgtcaccaggcactcataaaattcatttatttgttatataactcaatgacctgaaataataggtgctcattgctttttcatttgatccttaaaaacaattttattctgtctaaaaaaaattctcctgctaaaatccaaatgattacctggctataggaggagtcccattttatgaacatgtatgaaatatttagttggattcagatgaaatgcaacttagagaaaggaatggataccagtagagaagatggaaagagacacaaaaatcagactttgcttacatcaaaattaggtctgttgtctaatcctgttaacctagaggcaagctgaaaatagatggtaaggataaatagatttttaaacacagtatttatatttaacagaatgtcataaaaatgacagaatgccatgaaattcagcatgtcaaaactttgataaaacaaacaagaaatttaataaatatgctaattagagtgaatatttaaagggacaaaaataacttgtcacatcatagatgtctccccagtgcagaatttattatctgctgggaaaatttggttttatgtcttcaatcaatatttgctgcattatctaattaaacattagtatattttttgtgctaatgagaaaccatgcaagagtccaaatatcaagtgtggtgacagcttgaatcagttgagtttggtgttcatgaataaaattcttgatgaatgtgaaatgaatggtttatatacataagttttatgtgcagtaaattaattaggctttaaaacttgttagcatgcttagctcctcttttttccattgaattatcttcctatcttccttccttccttcctttccttcctttccttccctccctctttgctttatttctttctagctcttataagataaatgacaatagtactttactatttgggctggagcctccctttttcactttcacatgattgaacactttgtggatttgtgagaaaaggggaaagaagatgagcacgtagatgcagatcagttgaggatagaagtgactgagagaattgggaccttgacttccagagactgtcagtcaagagaaatgtgggtctataaaaatctatgtgtgttcattttcattgaatttaaacactttttcaagaagtatcagggtcaatctgtttggacaatctcctatttttacccccttacaaatgtcttaagttagaaaaacctcttattttcaagtagtcatttttttttatgtgagtaccacactgctaaagactgaaatagaaaaaaaaaatgctttttctgtttgtagggaaattgctttctgaaaactactcccaataagatgtatacatcaaatgcaacttgattttactggctctttatctagagataactgatgcactgtcttctttcttagatacccttctgtaattcagcttggcatagtatgatgttttgagttcttattgagggtttggaaacatttgtcatcaattttatgtctactctattgaaaaagcaatatacaatgtattccatatttcttagctctgtgtctttgaggttttaaacctatattcagatagctgtttttagctacaattttgagtattcaccagaatttacaaattgccattttattaaatacaaaaaaaaaaaaagtacagcttggatcaagagatcaaacatttacaaatctcaatccaaagccattatttttcagggaaaattaaatcatttctagcagagtatttgactcctaagggaaaataagtcaaatatcttctttaagagtaagggcattcttccattgtaggtatttctaattgactttataataatttgaacaaatcttgaacaagatttaaagaatttataatctcccaaacttaaaattgtattctttctggttttttatttttatgtattaagattatattcaaaccacttaattatcttcatgacataagtttgtgttaatagaaaattatacagaaaaaaacatgatttgttcctctgtggaaagatatgcttcaatgagttaaatacccttgaattttggttctcatttcttatttggacttttctgttatgtacctcaggggtcttaaattctaacagatgaagtagtcaaaggggtataaaatacttgaaaaaaattaaaacttcaaaagggacgaatttctctgttaacttttgtttatcctatactgacttattttgaaattgtgaaaaaacaggcagctaccatataaattggtatctatgaaaatactgattactttcttcctgtgattttcactgttaagaaaacctttgtcttgaaatgatggacaatcttaatacttgttcagataaagaaatgtgactttcaatacctttaccatttgtatttctttagggaaatattttaataatgattgtaaaaatagaagaaatatggttgagaaaaatagaagaaattaagatgaaatttgaacagttgtaatccacagtcccatttttccctctattttattgccttctactaagttattgaaggcccagatctgcaaaatttacaagctactaattcattgtctcctttaagaatttggagcaaaaattattccgactatgcggaaatgaattcacatcatcatggcaggttttgactatgagggaattcaggttaggttcaaatagaataatggtccatggagaaaaatactttctgatttttcttcaagttggatggaaaggtttttctttatttaaaaaaaaaaaaaaaaagtcctcctgagaattttgccttcgaaaaagaagttttataacagctgcctgtagctacattataacttcggtaattaagtgacaaaactgtctcattatgcttttaaaatactgattaagtgcattccagaaataatacatatcattcatttcaaaatcaacctacctgaattctgactcttcaatcatgagtagccattttacaaaaccaaagggtctcatttcccaaacagtactttaaatatcatcctaatagtaatatcctaatagtaataatcctattaatactcacttcaatgcataaaataaacagccaatgcacttccatcaagtctgcaggcactatataataataaataggtttccaaaatcacttaataaaaacacacagttataatgtgctcggccttcattagcatcctctgcatggggtggttttcatttaacctgaattattttaacattttggctaatttgtttgctgcaatttcatgggtctaaatttttggtttggtttgcaatgtaaatcatattgtatatctgctcctttgttattagatttactttgtgaataatatcttttaaaaattgagttatcaaaaacttaaattataatgtcatcaactaataccaggtaaatatactaatatatatgtagggcatgattaaattgcatatattttgaaatgtcaaactattttttgtttttttaaaaaaatgaatgcatctcttaaacctgtaccattaattttaaaaaagtttcatttggtatttcatattatattttaaaatatttttctttatctagtagtacaggtttaaagaaactttttctgattgaaatgataaaatatgcctcatttcactagaattttaagaataatacatgtaaaagtataactcatataagattataaatatccacaatatcttctttgattttcatgtaacaccactttttactcattcttttatttgttattattcgaaatcattcacaatgtaaatagcatgtttcatgatgtaaaatgtctttgcatttacagactgcagaacaaggtgaatttgtatatgaaaaataagtgatggaaacgtgggattcttataaaacaaagtggaaatgatagttctgtgttatatttacataattcattacaaaattgtctagttaagtcatgcatttatttaccttaaaagtgtccaaactgtcacttataaaatatttaaatcaataaataataccaaaaaggagtctgaa

SEQ ID NO: 54 - DNA, 70353 bp, Homo sapiens
cacacagtgatttctgttatggcgattgggcggctgcagagaccaggactcagttcccctgccctagtctgagcctagtgggtgggactcagctcagagtcagttttccagaagcaggtttcagtgcagagttttcctacacttttcctgcgctagagcagcgagcagcctggaacagacccaggcggaggacacctgtgggggagggagcgcctggaggagcttagagaccccagccgggcgtgatctcaccatggtgcgttttggctgctactttctttttcagtctttcggtgcggagaaggggaggaggcgggcagaggtctgaaaaaatcgaatgccttatggaaaggaactgcaagggttcctttggggtgatcaaagagggagacacagacacagagagacaaaggcaaggaggactgtctgggagccacgcgggcgatacagtttccgaggcacgccgcgtcccgcctagcctgttgaacaggtagacatgagcgacccaagcgtaagtgccgctgccgcgagtgcccagggtgcactcgcgcggggaccgacaggtgccactgcagggtcccctctcccgctcactgcctgccacccctgacgcctgctctctttctccattcgcagtgcggatttgcgaggcgcgccctggagctgctagagatccggaagcacagccccgaggtgtgcgaagccaccaagtaagtggtcgctgcatccccacgcgggtcggggttcttcagacaggcggtccctcttccgggacccccgcttgggctgggtctccttcctctcctgagaaaccttcggtacgctcccagttgcccagccctgggaagccagcatcgggttcccacgctggggaggagcgagaggaaaggagaggacgcccgaggggccggcccagggcccgggggacccgcggcgcccgagggaggagcacagacgggggtgggcgccgagcagcgccgcgccggctgctgagctcgcggggccgggccgtgagaacgcgcggggcgcgccggggccgctggtctcccacggccagggcgcctgggccccagagcccatcagccgcgtgcagcgctgcggcctccggcgcgccggcaggcaagcgagcgggcgcagctgggggatgcctggaccccggaggcagcagggctggaggcggtggcgggcttcagggcaacttcacccggccggctgcggcgtgggtaagaggcgcgtcctcctccacagcaaaagctgcgatcgctgggctgcccagagaaggcagccggctaactgcccagcggctccacgaggtgtgcgcgtgtgtgcgagagagacaaatgatttactgcttagcagtcccatttctgttttcgttaggactgcggctcttggagaaagcgtgagcagggggccaccgcggtctccgcgcctgtctgcaccctgtcgcctgagctgcctgacagtgacaatggtgtgaggggctgcgttgcaatgtggtcatgtgatttcaggctatggatttcgtgcgtctttctctgctcactgattttcacatggttattctttcattttgcactcgataaacagtttacatcttctgaagtaagccagaagattgtatggctcacttaacgatgactggttgaaggcatcttgatttggaacctatggaaacagtgctgagttttaaataggacagatttttttttctttcatttgaacttcatttataacatatcaatagtgatgttttaggatcagttctcctatggtaatttcactaaatgcctatttaatgaattgatttgatttcatacatctctaccacttactagaactgtctttgtacaaacgtcaaactttcctgttacatatgggtaagcatagaagcacttgatataatttttttttatcttggttcagagtgtagaagtggtctgttgcttttcctaaaattgctatacatattttttctttaagagtgatcatttcaggtaccctattatgtacagtggtaaaaagtaaactcgttatgatagcaacgacgatgtaaccaaaataagcaacacttaattggtctgaaagttatacatataagctttattattgcttcagtggaagttgtctatgcattctgtgctttgttcagccattaaacaactgggtccgtgatcttcttcaaggggccgtgaagtccctaaaattgtatttaaacattagagtggctgcattttaagggagatagtacatagtcaaatatccaaaatggacctgtgtcctaatagaaaattaagaaccacggggtaaaaacacgtaagccatactttttcttatcaaaacaacaggctgtctacatacagcctgcagacataggctagaaggaaaattctagaacaattaaatggtgttaccgtagttaaatatttcacataaaatagaccagatgtatgtattttaatgtattaggaaacaggtctgtgaacgtatttagtagaaatttgtaattaatagatgggtaccttatatttatatttataaggtatatttatactttatattgtaagatctctttctattatacgacagaaaataaaaattatatttttgtctttgaaatccaatcaaaatataaagtacttatgcttggtatagtgtctcatagtgtatgaaatataaatagccccttaaaggtcttgcttctagatattcaggtattaaataacatgattaaaatcgttttctgtcattcggagaatgaggaaggaaatataaaattattttatttatttatggcaataccaaaaacaaaagtgtgaaaaacttcacaatgcttagtacttataactcttataattatgtcttattaagggatctttcttaagacattttgaaaagctattttaatatttcactacaaacaagtgataatattaaaattaaagtatatctattacaaatacatcagtaaaatattttgtgaccgaattttaagaattttgttatatttttcaaatgaaattgaaaaaaattaaatgtttatctaacatcacttttattgacacattgatattgcataactttgaattttttcagaaactatacaagggaaattaaatcctgcatttacatttgctagcaactaatgagtgtggactgaggataatatttcttgctttacaggttagtttaaaataacacgatctgcacccccataatttctaattaaccttttttcagaactaaataaacatcaaattagccatcagaatgaatctctacaagtaaggggaaatggaaaggtaaagcaacatttcagtaatacaagccaaaaagtatgtgcattaatgggaaaaatttttggaggaagctgttactgagaatgactttttctgtcagattcactaagaagttgcttggcttttatttgtgagaatattccattttgaaggcactatttttacactggttaattaaaaatatttacccaagccacttttcttaaacatttctatttattacttttctgcacatttgtaaaaacaaattttttccccaaagtattaataattaaaaatatgtttgtctcttgaccatctacattcattctgcaatagtttgttttgggtgtctacatcttgacttgatataagaagagcttttgtcaatgtttagttactagttgatttactttgggtgaagtaatttcctggctatcctgaatcatatctgcttcttttattttctttcagaacattttgaaatgtcttacctattatatatgtaatttttcttcttccctgggttcatgccaataggcttcatcttcctatagcctcgaaggcttacagaggatgaacagagttattttggaggggtgaaagaagagctgtagagtgggcttccctctcagcccacagtaggagagaatggctacatcttaaaacttgagggactctggagcaggctcttccttgccacaagaatgtgcctcacagcctgtagtttctaacttctggtatgctttctggccattaaacaatatttcattaaaacaaatcctccattttaaaaattgaggccaagtcaaattaattaactcacataccaagtcatctatctcaccatactaagaattagcaggaagtcgacacgagacaatggctttgagagtgaacaccttcttaggggggaagcaaatggggcagacccatttcttaatcctgacctttttttctaggtccagcctatctatttatccccttttgctatgtcacatgacattgaaagtacctgtttaaatgtctgcatctcccattaaactcaaatctccttcacggtatccaatgttggatccatagtgcttggtgcatagtaggtgtctaaagagcttaacattgttgtcattgttattcttgaattaaggcttgtttatgctttgatgctaccacatggagctatggtcttggtgacagagacccttgtgtgctcttccgtcatatagtttgtggcctcttcagaattgcttgtaaactgttatttatttcaccaacaattttaactctgctccaacccttaaatctcttgccactagacctaccagaacctgccttcccaatgtcagcttcacttttaatgtttgctttaccttccttgctgttgatttagctggacaaagagagacataactgtatcttgtagccaactaccaattgcttcactccaatgtcagcttggaggatactttgtgcagctattttattcttttttagttaatgtcatatcaaattctccatggtacatattctggatttttccaggttttctagtctgcccagattatctccagactcttcattcttagcagaggaccatactttttaattcacagaggatgttaaggtcagtttgggcaaattatttgtcaacactcatcttgaatacagtaagcatttctttgaccagctgtgagcataagaactcttttcttatattcagctatcgaatttgtctctataatatttatatctttaattttttacctcttagagtatttatagaaaatgcttttacatctaacaactcttaatagtgtctaagataatattcagtttcttcaacccatgcttatttaccatgggttgagagtctcattgttaccagggcttttctcttttggatgcacttctgtttttattaaagtgtgatccccagagtttaacatagaggactgtcctctgatatatttatcttctctggatatcatgtagtaaatcaacctgaaatctattctactcttcccccctccgttttttttttgcactcatacaacactgtttaattatgtatcttttttgcacattcttctgcaaatacacttattttccccatcgaattttatgtttggccacttgatttgggacttttacaaatacttactgcaattaaatttaatcattacctttagttagcctgttgttccagaaagtcaaggtcatcttggattctgagtccttgatacagaatagccattttcaccaatttagaggaattaacagatttgatcaggatataattaacatcttcatccaagtaactatctacaatgctgaactggaactacctttggcatattcctagacaccgtcctttacgttagactcctgctttacattagtccataaattattcctctttataaggctgttcaaccagttatatagtcaaataactctctttgaagttgacattcctttgtgtgacttaagagagtatactgagacagacttggtcaaattcctccctgaaatgagtctccactttctgcagaatagatgtcaagtaactgctattaaaaacaaaaggagataactaggttagttgacaaggataggttcctgtgacctctccttatcttgtagataacagcacttcacattttgaatgcttgcatgccatgtttttaatcatctctttggaatagtacctgcaattaatgtccagctctctaaattatagctgatggaatccaccttcccaattttgaaaattgaggcaatggttggactctgtcaacacttctcttcatcacaatatttttaaagatgactttaacaattcctttattttatccacacatgctttcaatattttgtagtgtaatttctccaaattaatggatttaaactcatttagaatatttgctatcattctacatgctggacctttgttatttttagttttgttctacttttataagtatggatattgttttcttaaggaatggatatgaaacaaaacaagagcagagtagttctgcctgtttgttcatgtactgtgatttgaatatctttatccagtgtgctcttcctatatctaataaaaatgccattatcaccactttatctggcaatcatagcaagaattaaaaggacattttttcttttttttataagcttcaacttattttatgtcttatattttataacactcttcttagagactcagccactattttgtacttctctcaataaagtttattatggattatgcttgtcactgaggaagatacaaagcaaagtttatgacacacactccttgacttgaaggaatttaaagtctgcatgaacaaaaccaagaaatagtctcagaattatacatgtcagcacttaacaatgagcataatatttgtagaatagttttaataagttttaaagaagttaggagaaggaagagagttcggtatgatggaaatattgagtaaggctttccagaggaaatctaagacttagctgaggttttaaaacaagatcaggatgttggacatcacaggacctgtaggatttaaatgtggcaaacagtaggaagagtattctagacagaggaaaggaaaggattcactgcagggatcagatgtgtgtgtgggtgtgcatgtgtgtgtttgatgtgtgtgtgtgtaccctgtgtgtggcggaacgggtaatgctgagccttcccaggccatagctttgaagtatttatttgtggagaacaccacttttccatttctagcttttcgtttccccttgttcaatctttgtggggcccacacctacacatcttgtagatctcaaactaagctctgcttcttaaaacctttccctgaacttccaagcctaaattgcatgccttattatgttttcctgtaacacattgtgcttcctttgtagaattattatgatatgaataattacttgctgaatttttactattatactgatacttgtggagagaggtaccatttctgtttagttccccattttatacacagtcatctaatacaagtgctcaatggctcataagcactcagtgaaaacgtgtgctatggccgggcgtggtggctcacgcctgtaatcccagcactttgggaggccgaggcgggtagatcacaaggtcaggagttcaagaccagcctggccaagacagtgaaactccgtctctactaaaaatacaaaaaattagccgggcatggtggtgggtgcctgtaatcccagctattcgggaggctgacgcagagaattgcttgaacccaggaggtggagtttgcagtgagccaagattgcgccactgcactccagcctgggcgacagagcgagactccatctaaaaaaaaaaaagaaagaaagaaagaaacaaagaaacaaagaaaacatgtgctatcatgagcctacttggaacagtgaagttatgtggagagtacttgtaaaaaaaaaatgtttaaaataaagaagggttagattacaagtccagcatcttcgttctttatatgcttattctaacagattttttctatttttaaaatttatttctttttacatcttaagcttttttattaaaaataaagacaaaaacacacaccttagcatggacctacacaaggtcaggatcttcagtttcactgtcttccactgccacatttctcactggaagatctttagggacaataacaagcatggaacagtcctcgcctatgaatacaatgccttcttctggaataccttctgatgaaactgcctgaggctgttttacggttaacttatttttataagtaaaactagtaccctctaaaataacaataaaaggcataatatagtaaatacataaaccaataaaatagtactttattatcactatcgagttttatataccgtaggtaattgtatgtactatgctttttatatgactggcagcacagtaggtttgcctgcacgaacatctccacgagcatttcagttatgcattgtgctatgacattacaatggctatcagtcactaaggaatgggaatttttcagccccattataaacatatgggaacatgattgtgtatgtggtccatagctgacagaaacattgttatttggcacgtgacagtatatgcactggaatttttagctgcttatttttctccatttgcaatatcactttgcagcttcaaatatgctcattataagcagttaaatgatatgtggtttttattacattattaagttaataaaataagtgacaaggagtttcagtattccatagtataacataaacttttaaattgtgtatttgtgagcataaagttatatcaagatctttagcactatatatgaagtatttagagagttacaaatgtagcattgaaggaaatttgggtaaatgcaataaaattgtcagtacatgagttgtaaagcaagatatccatatattagattagcactatacatttgtaaatatgattagcaaaaggcaggcttcccagcgaaaacaaacgtctttgggtaaaattctatttcttttaatgttttaaaatatttgtagtcactaattgtaagtcatattcctctttgtccagctctatcccaaataacaatttaatacaccgcagcatctatttctgcttattttctgtgtcactggctcagaataattcataagcccttgttgtttcatcttatgctaacaaaaatccagcagtggtatgtaggagagctgtgatatgccctgataagagtttatactttggagaacaaattatcctaattaaagtcactgcttttcttctcttctctctctcctcctctttgaagctgtgagagtttatcttaacctagactggttaccacctatggctttatggcttgcctgctggcttggctgagagcaagaaagttgtatatgagggatatcacaaggccaccttccacaaaaattgctctcccacttggtcctgtcctaaggcctaaatctcctttgggttgatgcaatcttttggagtgtctcctggagtcaataagatgcctgttttaccgtgaagagcagcacaatgaagaggttgcccaatagcagtggttacttttattatgttgtctttctgccttcaatcaagagcatgacacttggacatagctttttaaagtaaagagaaaaaggaaactgaaaggctcagtatgtgggacatagataagaaaatgagacctaaatagggtgtattgggcaacaatacagggcttaaatagaaagaggaagaccaaaagaaagcaaagaatgtcctaagaagagctggtttttttttttttttttttaacaattttgttgcctattagttttcttcattcctggggatggttgggacatttttccacatcggcatgttatggccttgattatctacctaaatcaaaccagaggaaaatcattttagtttatttttatcttaacattggatctgtttcagcgcgtcctggaaattagtagttgcatgttgtcaccgtctattttgtacacagtgaaaaggtatttggctgtgtttctatttacattcactgtccttgataaatactaattggccagtgattgtaagtctcaagaatttttgctgcagagcgtgtgttaaaactcattttaagtggtgtaggagtcatgcagtgtttatcacttaagtgggtaatctgacagctgtattttactgcctgactgcagctttattcttgatcattctcttccttgagtagtgtgttatggtcatgttgtcttagctgcaattaattcccaacctttttttgttttccagtctttgtcttttgcatttatttttctgctcctgcaatgccttactttgctgtctctgcctcgctatttcctatttattctacaaagctcaccttaagtgtcacgttttcagggacatgtttaccaatgtactgtacaggggcacatgcagattcttcatgtccccatcacaacctgtcatgacatcacactgaactgagtttgtgtggtctaagtctgtccgccccaacctttactcaaaacgttccttaaggaactaggattggattgtttttatttctttgtttttgtttttaatccctgaaatttcgtcctttagaatgtagtaataggtacctaataaatatttttggcatatgtgaatgaatgagtgagtgaataaataatcagattagttgatgaaagattctaagggaagattaggtaatgtgattataagagaaagatcctgaagaatgcttgggaatggatcctttactcatacatgattttgttcatcagcttatatgtaggatcacagtcatttggaaaatattggtccattgaaatttatacattttccaaatggtgacacacttcattatacagtgtcaaaagttagccttcatgactatcaccactgatctcatcaggaagttttaagtattggatagctataagctcacaatggcagtcctagatagtgcagccgtggattgaaaaagtgttctagtttcctctttttaagccaagaatccatccttaaatataagaagaaaatcaggccgggcaccgtggctcacacttgtaatcccagcactttgggaggccaaggtgggcagatcacctgaggtcaggagttcgagaccagcctggtcaaacatggtgaaaccccatctctatgaaaaatacaaaaattagccgggcatggtggtgggtgcctgtaatcccagctactttggaaactgaggcaggagaactgtttgaacctgggaggcggaggttgcagtgagccaagttcgtgccactgtactccagcctgactgacagagcgagattccatttcaaaaatatatatatatgtatatatatgaaaaaatcaatagacttggtcttagaataaatattaaaatctaaaataataagtttatataaaaaattagcaaagtggaattacttcttatgtttacatttaagaccaagaaaaacttcaagatttcaaaataataaattattagacaataatgaaattacaaacattataacaagtatactgatagttaggaaaaataatagagttctgagaacaaactgcgttaatctccaaaaatgtacacttatactttaaacctactaatttagaaaattctacacaaatataaattccattagaatgattacatcatcacatgtcatgtagtctctggagaactctgctgcaatctgtgagagaatgagaatgaaaaaggtgcataatattagaatattgttatgaaaatagttctgaccatgcatatcctctgaaaaggtctcaggacatccccaagagtttgcaaaccacatttcgagaaatgctgctttaactcaaatgtgtcttgaacaaggtaaacataaaggtttttacaataattttatatcaagtccagtttataatagtgaacatttcttaggtacattttacattccaagcattaatacaactgcattactttaatcaaatcccttgaggaatgttctattctcatcactgttctacagatgaaaaaatggatgatgcacagagtagataagtcacttgcctaatgtcatacatttaattaataatggaaccggtatttgtagccagggagggttcacacttttacttactatggtaattactatggtaacctttctgcccacattgcaagttttcctgatgatttgtgaattacccaagttttgcttataaacaatagcatttgttgaatgtctagcattttaagaaactgccaaactgttttccattcccaccagtaatctgtgagatttccagttattccacattgccaataactcttgacattgctgaactctagaattttagccattctaatgggtttttgtttaataactaataatattgagcatatgaagaaatgtttatgactgtttatataccttctttaatgattgtctattcagatgttttgcccattttaaaatggaattgtttattttcttactgagttggaaaactgtatattctgaattaaactcccttgctgttgtgtgttacatatattttcttctagtatatgacttgtgtttttgtttatgtaataatgtcttttgaagagccaaagtattttttttattttgatgaagtccactttatcatgctctttttaaatatttcatgttttttttttcaaatttaagcatctttgcttcaaacctggtcacaaagaatttcttttatgttttcttctgtaagttttatagttgtaactttcgtacttaggtttacgatttgtcgtagtctgtttattttgctataaaagaatacccgaagttggataatttatttacaaaagaggtttatttggctcaatgttctgcaggctgtgcaggaagcatggcaccagcatttgcttctagtgagagcatgaggctgcttccactcatggcagaaggtgaaggggagccagcgtgtgcagagattactgagagagagaggaagcgagggagagagagaggagacaccaggcttttgtgtaacagccagctcttgaaggaactagtagagcaagaactcactggctatcgtgagaacggtgccaagtcattcatgagggatctgcccaatgactcaaacatctcccatttcactccacattcaacactgaagattagatttcaacataaagtttggaaggttcgaatatccaaaccatggcatggtccattaagatttaatttttgtatatggtatgatgtgtggataaaagtttatttctatttctatatggatttccagttgttccaatggcatttttattaaaaaacaaacaaacatattttctttcctgattttattgccttgacacctttgttgtaaacacaattgtggatctctatctcattgatctctttgtcacccctttcaaactgatacctcactttcttgattactttaactttttaagttttgaagcaggtatataagtccttcagtgctattttttcttctttaatattaatttggctatcctatgtcatcaatgaaatcttagcctcattttgtcaatttttactaaaatgatggctgagatgttgattggaattgcattgaatctataaaccagtttagagaaaatttgtaccttaacaatattatacatggtatatatctctccatatatttagaccttccttaatttatctcgtgaatgttcgtagttttcagtgtaaaagtcttgtaagcctttggttagatttattgctaagtatttattaacagtatcataaatgagtttttaaaataattattttccagtatttgtggctagtacagaagttataatggaattttgtatatcagtcttgtatcctgaaacattgcttaatttacttcttagttctagttattttgtatatccactgggaattcctacatgaacaattttaagtatatgtgtgtgtgtgtgtgtgtgtgtgcacatgcatgtgtatgatccttgaacaacacaggggttggggcactgacactcctgcacagtcaacaatccacataaaagttttgactcctcaaaaacttaactactaatagcttactggtgactggaagctttaccgataacataaacagttgattgacatgtattatatactgtattcttaaaataaagtaagctagagaaaagaaaatgttacaaagaaaatcataaaggaagagaaaatatatttaccatttattaagtgcaagtgggtcattataaaaaatcttcaccctcgttgtcttcattttgagcaggaggaggaagaagaagataaggggttggttttgctacatctgggatggcagaggcagaagaaaatttgcatatgagtggacccatggagtttgaatctgtgttgttcaagggtcgattggatacacacacacacacacacacacacatgcacacacacacacacatgcacacacacacacacgtgcacataaacctgcaaccttttggccttttgtttaactgattgcaatggctaggacctaacttctgtacaatattgattagaagtggtgagagcaggcatctttgcttggtcctgaataatagtggaaaagtgttcagtctttcatcatcaagtatgactcaataattatagttttcatagatgctttctgatgggttaaaaaaattatgattgcagagcttgtctcacttgttctcattattagtgttggagtgggagtctcttgtgactttctgcaatttaaccagaagtcaaagaccctgtactttgagctaacttttgtgctctgtatagtaagtatttctatttacagaaagctacaaatataggtaacaaaagaaaaggatttcatatcctcacaatccttctttcaaacttgctgtttcccaatccacagatcttaatgtaatctgtactcagttacagtgtagtactttatcactataactccttattttcttccactttcagtctactattcttattcaaaattttgccttaaaagccataaacatctttctaatttaaaaatcaaatgatattttctcagtcctccttaccctcttcagacttgtgacatacacttcttttcgaacacgtgtcctctttcatattcattctcattgtacttttctaattgctgcttctctgtcatagtcataatactttctccagtccttaaacatgaggattccctggagttctaaatttggttatcttctctctatatatgtagcctcttgatcttaaacagttttagttaaactcctgactataatggtttctgctatggggaggagcacaaattcatctctaatctgttacacatttctgaagtaaatactccgattttcaaaagcacctccaccctagattccctgctacctcagttcaagatccatgtatctaaaacaaattcaacatcctttctctcaggcctactgctctgtttctgttacctgtttccatgaacggtgctatatctttctacacaaaacttcagagtcattctattcctcagatctagtgagttgccacatcatgccaactttaattttataatatctctagtagccatcttttcctgcctctttcccacaatttccttcatttcttgctttcacttacactgttctttctctgtggcgtgccccttgccaaaatcttaattttcagaacttagtcatttaaaaaaataagctcaaattctgtacattccaagaaggcttccctgatgattcttttgccaccaccgcctaaatctgatatttcttataaacagttttaactctctatctttacttattctccctttttattgtagccattagctatttaataaaatttcttatatatacataagaaaattcgactgggcacggtggctcatgcctgtaattccagcactttgggaggctgagcggggcggatcacgaggttaggagttcgagcctgaccaacatggtgaaaccctgtctctactaaaaatacaaaagcattagctgggcgtggtggtgtgtgcctgtaatcccaactacacaggaggctgaggccggagaatcgcttgaaaccgggaggtggaggttgcagtgagccgagatcatgccactgcactccagcctgggcaatagagtgagactccatctcaaaagaaaaaaaaagaaaagaaaattcagtgtgtgtgtgtgtgtgtgtgtgtgtgtgtatataccccactcatatcaggctttgaagaaaattaaagaaaggaatattttttgtccttttatgaaacagtaaattttgattgaattataaatggatctactgacaactcattttaaaatgtatttccaataagcaagacattttagaaactctgatttagctttcttttatttgtattttatgttttttctggttcatgttttgccccctatattgattatagctaatagcctaatattaatatattttattgagattagttaatattaattgagtggccaaatgatggatgattctgtgctgagtgtttctgataaggcagtcaagtatagaaacatggatggtttttcatttagctgatttcacagcaaagtgcaaaaggaggataggaaattacatgagcattgttgatttctttatcaagcacagaccttggaaatgcataaactctatgtatagtgagatttcactttttctgaaaaaagttgaaaaacaacactaataataagtaaaatagaaaaagagaatatataggaaaacaaaaaaaatggcttgtcaaattgtgtgtcatttacagaggtgtgtttgtgtcttcacatacaaagaatccagggaaaataaatggaaaaaaattgaataaatttaataataacaatttagttagcctatctatgtcacttccgtgtttataccagatgactcagagccagtagttctttcaatttcagcagaaaataattattggcagtcccaaagttggataaactgtgacctgcattggctggtttgattaaggctggaaaatagcaaacttgattaagtgacaaagacaagataatgaggaaagttatttagaaaatgtgtttagagatttgaaaagggactaaaagatagtttctcaagaaagtgcaaaagaagatgagaaaattatgaaaaagagtctggggcaacattttaggaactgtagacagtgaaagcaattttataatgtatgttaatattagcatgatatatagacgaaaggtaatcttctgattggtctgagatgaagtagttatgttaaccctcaaaagatgatgaagtgtgaaatttgaattcagataactaagttttcaagttttctcaaagtattccctgcagtggctggtggtccacaaagaaaggagggcttctcagcattttcagtagaggaggtcatcagggtatattgggtgaactcaatacacctatacacctcctgagctttggggtttgagccacatcactgaagtctgcactctgtcatctgcaaatggaagggactgcaataaataatctctaactcctcttccagttctaaactcctattatgcaaatgactctgtctttatattgacttttatgtaagaggtactgaaatgaataggaaaaattgtttggtatttctttaaattttctctattttgaatcaattagatggcagaggcattaaaagaatatagttgtgggtttggatttaatgggaaaagactcagcctttctcaatatggactttgcaagcatccaaatatatacctgcaaagtatatgttcagaagtccaaattcatttctggtaatgattcttctaaactaatcattatgtaaaaacttggcagaattgagtttgtgttggaatttgccacgtcttttgctaacctgattccagcataagcatcaaggatctgtgtcccagtgttatgacaaaagttcatttcctgtcttaagaatcagaaagagctttactgctggtcagaaaactagaaaaggtacctgactacccatcaattactaataccttagtagcctggtcccctgggccacctccaaagaaacatctgctgagtctccaggcctcgaatctcacacttcacttttatgagccttttctctggggtcataaaagaaaatttctctgagaaacgtactttgccaaagtttatcccttggctttgttgtaaagatcctttaaatgtggcagagacaccaacagcctttttagctgcctttcaattcttctctgatgcctaaaactagagaggctcaaagtgaagttttcaaagggagtctccttagagttcactgggaccctggaagcatctctcatgccttcattttgggaatatctaaacttcattaccttaattgacatgcccaacaacctgatctttcattttattctgtacactaatttaacagatacaatttagtctttgttttcccagattacattttttagtaggggaacttgaataataatcaccatgatatgtcaaaagctcctggtttctcaaggcagctccacagcaggagctctgtagttagatagggttgggttcatttcctgtttctgccactcaccagctatggccaaggacaagttacatgatcgatgtttcagattcttcttgtgtaaaaaatactaaaatacacaaacacacactcacacacccttcccataagattgttgtgaagattaaataagataatgtatgtgatgtccccaacagctctttaaagcaggagtcagtcaacagaccccatcaaggacaagatagtagctacttaaggctttgccagtcatgtgacctccatagcagttactcaactgcacagtttgaacacagtagccatagacagtgcataaatgagtgggtgtggttgtgctccaataaaagtttatttatggacatagaaatttaggtctcatataatgctcatgtatcactgagctcctggtgttctcctgcatgacagcttagctttgtctgaccctctcagccctgctccagcttccgcagctcctccaccgcctgaaccgcctccattgatgcatctgttcttgttctccttgtgttttttttttttttttttttttttctctttgctgttctttctgtagccaggcctatacttctccattaatgtgttcttgattaggtttggtaagattctatctccagcattgcatagatgtcttaatttttcatagctgtataagtttcttgtcctttctctcaaagagcttggaaaaatttccaaaggctggattagaagaactgtgagagtcactagtgtctcttattccagaatcttctttccaaatatgacaagttagagtccagccagtttgtctttcccctaccattcggtgagttctgtactcacaaggtcactccttccttcccatcaaggatgaattgaccttggtatctcctcattgctcagaaaggtaattcaagtgttccacaggtcaatcccagagtcacttcacttttgtcaggaatccctgtgtctcttactttaactggactctgggtgacctatcttgtttgcacaaatatcttaaagtgaacatgccaattagtgtctcacctctacctgctcacaacctaaacctttccaccaaactaacattgagaaagtaagtagataaaagaattattggccaggcgtgatggctcatacctgtaatcccaacactttgggaggccaaggtgggtggattgcctgagttcaggagttcgtgaccagcctgggcaacacggtgaaacctagtctctactaaaatacaaaaaaaaaaattagccgggcgtggtggcgtgcgcctgttgtcccagctactcaggaggctgaagcaggagaatgacttgaacccgggaggcagaggttgcagtgagccaggagtgtgccactgcactccagcctgggctacagagcgagactccgtctcaaaaaaaagaattatcactgaatccatatttagaagaacagttagcttataaaagcaataattagagacaggattccttgtataacaaatactaatcatttcccaatatggcattctgggaaaataaaatcagataccacaggatttctatttaagtttggttgttatgagattttgttttgttttcaaatttccacattgggaataatatgaattaataaaaaatagtgagtagtgcaatggcataaggcttgcttgatttataaaatagttttggcttaacgagtagaaaatgaggtttaaaattcaacatagtcacccagtttttatattctaatatttcattaaaggaattagacatgcaacttattatataatagaattagataagataaaaccaaaatagaatctttctgctctaagctgtgctgcaaattctataattttttagttcaataaaaagaactgttgacttagatataactttcttggtatattctctaatgctcatcaagtaaagattgctttctatatttgtaggataatgagcattggatatattattagagttcccttaaacaagctttgatgcatgaaaaaaatggtttcataagtataaaacattaaggaatctttctgagaagctagaataaaattgtcaatcatttatttaataacttatgtcagcacaattttcttgtagtatgcaatgagcatttacatttggttgtatgtaccaaaaaaaaattttagggttgctctgaagttatcaaggagacactgatcatttttttcctgttataaaaagttgcctagagctctagtagaagaagcatcacagctttcgtaaggcaagtgactgaagacttgatccaagactggacttttatctttttttaaaaaaattatggacctatggatgctaggcaagaccaggcactttatatatattattccaaattcttaatttgaatctgttacatcatgactttaccattttatgtgtgaaataacagaattcatgaagttatgaaacttgtccaatgtcacactaccaccgagtagcatttgtgatagtcaacatgtattcctcccatactgggtagcagtgcttttctaagtgctttctatttattgctttgtttaatctcacaacacatttatgagatagttgctattattatccttatttttcagatggagaaaattgaggtgaagttcagttaagaacttcactaatgtcgcagagttagcacatggtagacgcagggagcaaacacaggccatctgttcatgtagcctaagcttttaactgctacgccaactccactgcctcagggaacaactgggcatggcacctacatttatgtgaacccaaccctccaaattatgaagtctctgtcatgctaattatctgcatgagacatgagacatcaggcacttaaaaactcaccattacagggccgggtgcggtggctcacatctgtaatcccagcactttgggaggccgaagtgggcggatcatgaggtcaggagatcgagaccatcctggctgacacagtgaaaccccgtctctactaaaaatacaaaaaaaaaaattagcctggcgtggtggcgggcgcctgtagtcccagctgctcgggaggctgaggcaggagaatggcgtgaacccgggaggtggagcttgcagtgagccgagatcgcaccactgcactccagcctgggcgacagagcgagactcctcaaacaaacaaacaaacaaaaaaaaaaaaaaactcatcattacagaagagggaaaataagggtgtgtgtatgtaagtatgtatgtatgtgtgtgtgtttatgtatgtctctacatcaaggatgtagaggttttactttacttccaggccttcctgcctgaccaaaatttaaaagaggagaaattatgatgtcatgtaatcatcaagttcattatgtcacctaaaagaaatctatcaattagcccaattatttaatcaaggatttgttgtcactttaaaagtttcatcagattattttacctaaattataatgtactctgtggagtctcagaaaatgtgatcttgttgagtgtttcttccaggttggtaggttggcttttcaccttatatgcaaatttaaatcaaacattgattagtgtaggagtatttctgatataacacagcatagatgttcttggaaaacctcatatgcttcaaaactgtgcactaaaaataaaaggacttagggaaaaaatgtgtttgagtgaaatcattcaatgcttacgagcactaacaaaagcaaaaaagaaaaaaaacaaaacaaaacaaaatccccaaaatataaaagtttagttaaaagatacattgaattctaatgaatactgcacctcagcaattgtaggccttgacctaaggggaaaaaagtgaaagtagttggtaggaaagaactataagacagccttgagtctgctgagttatggagacaagagaaaaatacaggaaaattgtccaacagtacttctacgacagagcatatggtcagactgggctaagaggaagaatggggagcaaaggggatctagcatgcctgcattttatcctgacattatttccctagcgatagatgtgcctgagccaattgacattcctgaaatgtacagtacttatttgaaaacagataaaaacaaaatggctttttacagagtaaaaaggaattacatttcttccttaactcatttcataatcattactatattttcagtaagtatattttaaagtgactaagcctctgcaaggaactattttagcaatgtaactatgatgagaatcatagaaaaagatgcaagaaattgttttatatattttagggaaaattggttgaaaagtttatctgatttcctcatgatcagcatgatgcatcataagtagtgatgatacttaatttgaagatgtttaactgcatgtattcaaattgtagtcatcacacgggagagtttttaaaatatattttaggatttataatcccaaaggtttttctcttaaattagttataaaacattctgtaaatactttgataaaaactgagaaacaaaatgtgaatttgaatacttaaaatctccctactatagagttgagtgtactgaattttgctattatttcaaagatgccacagaattgcctcttaaatctaattttaaaagattgtagattgcactcatcttattttaaataaagatttaatgcagcttattaaacacaatttgtgtccagtactgtagttttatcaaggcggttgccacccggcgagtcggggggcaggggcactccaatatgattattgaaagtgaggttgccgttgtctttagagttgacctctctgttttgggagaatcatcagtatgggctcttgagttacaaaaatttaaggtaagcatcctcctctttaaaaatagcttgagacagctcacacttacatgtagatgcagtccgttaggaaggtgaatgccctactcagtaatagaaattggagtgaacaattactgggcttttgaacaaggagaaattgcttcccaaaatgagattttaacagaagaattggagtaacctaactcccacaaggtgttatataatattagaaatccaagctctaggcttggttaagattgaataaccagagtcatgggaaatgtattatggactattttgattgtgcactatggtccctagagtttttccttggctgggatattgagaagtaaagtcagaggaatgtgtcttccctctgctttggtccccacacccagtcagtagcccaggcctgcggattctctctcagaattacttctgcaattgattcattttttccccccagggtcctgtttttgcccaacccagatctaccatctgtcctactctgacccatttttcattctacattccaaataatcttctaaaaatgcagtctaattcacttactctcttgcttattagttatttagttgattgcccttagaatagagtattatcttgtttaatgcggtttgtagaactctgcaaaatcctgacctctgtctattttgtctctcaccaccattatcttgctctgtcttaacctcattcatgcctttgctacactggaattacttctgttcctagaacattggctcccaagcatgctgttctttctggaactctcttggcctgacgcagctcagatgtttctgagaggactaggttcagatctctgatttacattcccagagcactatatccctcccctttttgcagcagaggccacccttggaactgatacatcagaaatagttttcctcctggattgtaagttcttgagagcaaggggtgttctttacacatcactctgaccttgtgtctagaaaaatgcctggcacagagcaagaccttcgtaaatatttgttgaataggaagaaaaatgaacaagtgcatgaatgcgtgaatgatgtagaagacaatccagtaataccaaagaatctattggaatcaaaattattaaaaagaaaatgcagatgaatggagaatttatgttaaaagccaaaagagtcttgagctttgacttttaggcatcatcaaatttaataaagagatatcagtaacatactaaagcaaaagccagatggttttgaacttaagaataaatatgatgtaaggaaatgaacacagcccataaagccaacctttcaaaaagagtaacaataaagggagaatggtagtgctagagaggaatgatgggatgaaggagtctgagatttgtttgtctctttttaactttgtggcagagagaattggacatgctcaccaatttttctactactttgtcctgctttcctgatataccacagggaaagttctataaacatttcctactacaaagtgaaaagaaacctattttaaaagactggtttatgggattttatgtaatatttttcaatttttgagtaaggaaaactttctaagttttcagtctacctgaaaattaagcctttttccttatttatgaaaatagttgttacaatttgtactgaagtatacaaactttatccttactaaggcaatttgcttttaagttttctcctccttttggctactcttaaaaatctggactttcaagtttaatcttaaaaagctcatatctttttaatcacagatattggcatgtccaggtaccaggtatgatggtagacatttgatacagctaattgcttttgtgatggatacataatttttaggcttgcctcttccctgtaacttttttcgatttttttattatttatttatttcaacttttattttaagtttaggggtacaagtgcagtttgttacataagtaaacttgtgtcatgggagtttgttgcacagattatttcatcagccaggttttaagcctagtacccattagttatttttcttgatcccctccctcctttcaccctttacagtccaaaaggccccagtgagtgttgttcccctctatgtgtccatgcgttctcattgtttagctctcacttataagtgagaacatgcggtgtttggttttctgttcctgggttagtttgcccaggataatggcctccagctccatccatcttcctgcaaaggacatgatctcattcttttttataactacatattattccatggtgtatatgtacgacattttctttatccagtttatcattgatgggcaattaggttgattccatgttttactattgtgaatagtgttccaacaaacatacgtgtgcatgtgtctttataatagaatgatttatattcttttgggtgtatacctagtagtaggattgctgggtcaaatggtatttctgtctttaggtctttgaggaattgccacactctcttccacaatggctgaagtaatttacactcccacgaagagtgtaaattaaaaagcattcctttttctccacaaccttctcagcatctgttattttttgactttgtaataatagccattctgactggtgttagatggtatctcattgtggtttttgatttgcatttctctaatgagcagtgatgttgagcttcttttcacatgactgttggtcacatgtatgccttcttttgaaaagtgtctttttctaacttttcatctgctccttaagacctgcttttggagaaaagtgtatcagtgccagagagtgtggtaaggggtgttttccttacatgatattgttacatgtctacatgatcttgttacatgtagtaaacaagatgttcatgcctaattgaattctaggatgggcatggtggctcacgtctgtaatcccagtgctttgggagactgaggcacgtggatcacctgaggtcaggagttcgagaccagcctggccagcatggcgaaaccccatctctactaaaaatacaaaaattagctgggcatggtggctgccacctgtaatcccagctacttgggaggctgaggcagaagaattgcttgagcccaggaggcggaggtttcagtgatccaagatcatgccactgcactccagcctggatgacagagtgagactctgtctccaacaaaaaaaaaaaaagttcatgcttcattaaattttaaattctagagtttaaatgattgagggttgccttacttgcacaataatctgtccctgttattaatactaggccagtagctgggtcattattctcaccacggcaaagttaatcactcactagtaaaaagagagtgagcattaagtttatttggaggctgtttaattatcaacttttggaatgagaagtacctcttcaagtttctgagaacatattattccacttcttgccaaggcctgtcgccaaatttattattttaatttatttgtttttcccttaccatgttactaccatctctacaaccaactatgtactgaattcacccactgaccaaaccatttctgaagttactgctaacgttacccataaaaatcatcactagtttacttgaggaacaatcttttgcctgccaggaatattctgtattctgtattcctggcaggcaaaagcaagacaaacaggtttccaaggtatcaacactgcgtgcatctgcttcatagtgtaatttcatcagttgagcagatgaagaatgctaattagtttgtttatacatatgtaatttaatgagactaaacacttaactatcttaaagtaagcacaacttacttcctgttggctgtttttgctttaataaaaaacactgttcggcttatttcctggaaattatagtaccgtgcagtacaggaaaagaaattatttcaaggaaggttgactggtcaattgtattctactgcagctggattcagtaggaagataagaattaaaatattgggcttgggtaccagcgttgaaatccaatgtgaatgagagagttaagtttaatggaaagatctattataaactatattatggcaaacttctaagtccaatactaaaattctaatatataccagaataattcgttttagtaataattctatgccatcctcagacctaacctataatcttccatttcttattgtcttccttttgtttttatgtacccttttttgctagttattgtagttagattttgatataactgaaatagtggcattcagttaataaagctcttttccctgaaaattaatacaaaatagtggtactattatttgtataaatagttatttagtattatctattacactctttttgattactttgaagttgttcaaaaactggatcccagccaggcacagtggctcatgcctgtaattccagcactttgtgaagccagggcaggaggattgcttgagcccaggagttacagaccagcctgggtaacatagtgagaccttttctctactaataataatgaaaaaaactctccaagctccccaaccccaaccaaaactggacctgcgtaggctgttatttttggagaggagtgactagaggagatgaggaaataactttgctcctatagtcaaaattatattttaattaaaatgctttagttaatatactcggttttctacaaccaggggtcagcaaactactggctatgttcacagtctgcttttacaaacaaggttgtattggaacacatctgtgcccattcatttgtatatcatctctggctggcttcacactgcaatggtagggttgaatacttgcaataaagaccatgtaacctgcaaagctgacagtatctattctcaggccctttacagaaaaggttaaagcacttttaaagcttaaagctgatcattgatttgaagcttaaatcagaagagaagttattaaacaataatagaattatgttgagatgtagtaaagactaagaaacaaatatttattacattaagtcccaaaacaaatgtgggtaaaattattagatatttaggttttgtagaacctaagtaatcattccccctatagccatattacctttggaccacttcagtagtctattgaggtagaccgcttccattctgttctggcagaacaaattttctactcataaatgcataggattttcttttgtcccttcttgaagttccataaattatatatgagcatagattttgtttataactttaggtaacagagccttggcagcttcttctggcctgccagcatccataatcttcctctatacctaatgtcccatgacatcccatggggatcagatactgaatttagcttccttgtttgtcccagttcagaaaatgagttgttcattgttctaaacttattagatgacttacatgtgacaatttacaggctgttgcttatgggaacatattaagggcattgaggagcatagaaaataaaaaaaaaaaacctaattgaacttcaactctaaagattcaaatataaggctgaatcttggatgtttcagataccactagccaatgaacaggaaattatgttcctcactgaattttaatataaatttgtaaaccatattttgaagataaaaatctaagttgattaacaaagcccgattgtgtagaaactgctctaatttagtaatattagtttggagttatagaaaacacattggctttggagtcagctgaatctgcatttgaaccctagttcagtcattctctagcatttgaaatgagagaaaactacctaaacttttgagcttctcacccattggggataataatacctgtgttatgtggttgctgtgaggattaattgtaaacatagagttcccagcactgtgtcaggcacatagtacttagtacatgtggggattagcaaatatgggttcttttccactctttgtttttcttccccaagagtaggaaatagctggtagacccagttaatcaagataattagtattgttgatgaactgaattcacaacttgacagttccagtaacaaatagctaatgataaatgggttgtgaattgtgggagaatttacaaccacagcatcaacaaaaacaaaagtactgggggaaatatgctggaatggcgatgcttatgatttcagtgggaagtggggtagtctttgactcaccgcagtctagatttgtttccagagacccctgcaaatcccatggtatgttcttggggatcaggagttctgatgtttttttcattttgatgataatatttttaaattgctttaccatttaaagtgataaaatttttcttttgccataatcatcttcattgaactttttttcattgaactttttttttctaagttggtgtttcaaatctgaaaacatatacttggggatcattatacatattgttttgctttaggtatttttggaagccattggtttttactgttctgacttttcagaaaggagagcataatgagaatgtagtagtacaagcatgaataaaacataaacttagatgtggcttttgtcataaaaccgtggtgttccactcttgtgaaatcaaactggaccagatgagtgtaaaaaatggaaatcagtagttgatgctaagaacattttggaaaaatatattttattttaaaagttaaaatagtaagaggaagtattttgctaatattgtgaaattcacacatattaagtaaagatctttgccaaatgtcctgctcattttataattggcatttccagcagaatttttttaacttgagaatgacatgactattgcttttgctcacctgtctttttctgttttcatccgtgcataaagtcactcctctttctgttctgactttttgctgtccatagacatcccagttaccagtgtccttgaattgatagtggcttctgtttgtcagtctcatataagaactacagctcatcaggaggagatcgcagcagggtaagagacaccaacaccatgttctgcacgaagctcaaggatctcaagatcacaggagagtgtcctttctccttactggcaccaggtcaagttcctaacgagtcttcagaggaggcagcaggaagctcagagagctgcaaagcaaccgtgcccatctgtcaagacattcctgagaagaacatacaagaaagtcttcctcaaagaaaaaccagtcggagccgagtctatcttcacactttggcagagagtatttgcaaactgattttcccagaggtgagtgcgtgctctttagattttgaaattgtaatactttgaaattgtagaagaatgtttttccaaggaaaatttaaacacttcctttctcactttcaaggctacaataaatgtagaatattttcttgaaacacataaaaatattcttttaaagcaattgtgttcttaagttgtgttttatcttaaaatgtttatgatcttgaattcttttcaaaagaacactgcagtctgacaaactttatgattttgggcaacaggcttaatgcctctttacctcagcttccttatccctaaaatggaaataatagtagtacccaccttctacagttttaatgagttttaagtgaaaccatccatagctcttgccataacataagtgatcagtagttgttagctattatcttaaaattaaattcttcaaagaataacttattttctgctcaaattttctctcctaattttaaagagcatcatacgtcccctgccagttttcagagttgtgaaaatctcccttggccacttgctctgattctgaagttctgctcaagccagtcttgactttctcccttgggtcggagtcatgagcctgtgattgcctacacctgcgtgttattaggtctcacacttcttcatatagccctgcaagctgcatagcatagtgtcatgttgagatctagagcaccttctgtcaatccaccttgaaggaaacttctgggaagaggacacagacctaaataaatagaagagcagttgaaggtcttcatgatgtcttcctccctctgtcagtcttcatagttttatatagatttgcttaacctatgaatttggctggacattgacttaatcagacaccagctaacataatacattgataatttttaattgactcaataccaaccctctactgtgtgcaaagcaccaaagaaacatggactggctgattttcagaactgaaaggaatttaacagataatcttgtttcactcccaggaagtgctagggaagttcagtgacttgaccaaaattacacagctttcaaagggtagagcaattaattcctgctgtaaacagtccaggctggaatgactgagaaagaagaaattgaagtttgaaagatggataaattagacttagcagaaagttgagggagtttatttcagatataatattaacacaatagtactttggcagataacctttgaaatggaaatgtttaattattcttaccacactctagttgctagacagccagcattggctaggataaaggatagagccctcctcagggagttggtttgtagcacagtctgggaaacaatcggtgctctcatttcaaggacagagtgaaatgaacagaaatgaaccaaaggtgatgatgaggaagctgagattgcttctatgttttccctgaatcctgtccttactatgttggctttatcattttgtttggtaaattttgaatttctgcaatggaagtcatacacatattggactcttttttaaaaaacattatggttcacctccagcctgggcgacagagcgagactctgtctcaacaacaacaacaaaaaaattctggttcacttgatggtgccaccaaaagttccacaggcttccttcattctttttcattcattcttctttttgcccttctgactgaataacttcaaatgacctctcttgaatttgctgattctttggcttaagtctgctgttaatgctttccattgagtttttcagttcagttattctttcattccagaatttttacttggctctatttttgtggttatctctttgttgatgtttacattttgctcatgcatagttttcttattttatttagttgtctgtctgtgttttcttataacccactaaatttcattatattgaattttttgtcaggtaattcattgttcttcatttctttagggctggttactgtagatttatttatttatttatttatttggttgtatcatatttccctgatttttcgtgtcccttgtagctttgcattggtgcctgcacacttgagtatgcagtcacctctttgcttcttttcagactggttttcacaggaaaagacattcaccaattggctcagctagagattttgagagcctctcaaacattttctatggatgtgcatgttccattcctctcttttcctgctgagggagaagtttctgggtggtgtgccttctcctgatcctgaagagccatacaggctgctataaacttcccttctctttttcctaggaaaatgtactgaaagactaggatgcaataccaaattaaaattgtatataaaaaatttagtagtctatgttgtttgttcatgagtttgtaagaataagcattaagatttgactacagtgtcatgtaacagagagggcaagactataggagatggaagaggtatgtttggcattagtaactaaaactcctctccaactgagatattatcgttatggcagtaaatgttccagtgttgaatacatttgagctgtgtagtcctcaatctagatgacttcaaacatctgcttatctttgataaatacttgttatgtttttttactgattatttgttaagtttatagatttaatgcttagactgctatttagtgtcagttgtattaataatacaaaagaagatatttaaaatagcatttgacatcacaatttttgttttagataatcagaattaacttcctggttatatttttattagtgaacaggcaagtataaaaatgtattatccttagaaaatgtaacatgagagaggtcgttctcaagtaatggaatactagagctttaaaaagtcttcttgatcatctaatgcaaacttatcatttctattttaagaaatagagacacataaatttagatctcttgcttaaagcaaaagataactggagaaatggaaaactctctgcatttcattcacaacccattgctcttcataatataatattgtttgctcttttttcatgggtattgtttcccaataattctgtaagctccttcaggcatactgtcttgaaggagcttttaatggagccacagtcaaagcaaatcagaaaccacttactgaattgaaataattgaattggatatgcttacataaatgataagatcccaaatcaagtacctagtaagagtaggatttgaagagaatcacgaggtctgtagatgtgttctagaatattaggttgaaagaagaaaaagaaacagtattacaatttatcttatgaattaaaatattattggtctagaaaaacgttaagcactgtaggaaaattaaaaagccaatgaaaatagtgacttatccataaaccacaccaatgatatttttattaaaattcacattgttgacagcaatgttgcatcaaatagcagtttttcctgaagtattcatatatggtatatttgtggcaaaagtacttgttttaataatttaatcagatctattctttatgagccaaaagataattgtttagtcaagagaaacaaacttgagagcactacaaactatttgcattggggaacaagtgtcccctctgtgaatcagaaagtccacaatctacaatacttcaggttccagtgattgtacaaataagaggatctgttcccccaaaattcaaaataaaggctttcccaaatagtagggtgttttagtgatagacaactaaaagatttacaaaagactgctacacaatgtttacatatattgaactgtaaggaatgaatttggaaggaaatattggatttagttctaaaatctgaaaccaaaaattaatatatagaattgttggggtatggagcagtcctgaagtggttgattttatgttatgaggccctgaggttggctgtgtgtgacagatctcacttatagttgaatcctgcttataattttattgtggactcatattatctcagggtcaggatatatcacaggaagtacagcaccaaggtaggaaactcgatgcaccagcagcctctaccaataaatattctgcctggaaaacatgtgagttctgtctcttatgggttttgttttgaatttacaaaaattttccagaagagcaatggtataagatgaatgtcaatttccataaaagcctattcactcataatattggtcaagtatgctactaatgctttgcacggactttattcctttttttctttaggaaaataagttttgattcaaaatggaaagccaaacatacatttgctccaccaaccttagcaattggaaggggaccatttctcctcccctcttacaatgatagtgtatacgttaggaggaaaagaccagaaaaagacatttctggtggcagtaggaaggaaatgaaagacaaataaacatcttgactaaaaaggtaaaagagtatacccaatggcttaatcagagacataaagaggagtggagtatctccagtagcatggaagaggaagaagaaagcattcttcagtggcagaattggttgggttttctttctccctggcccacaaaatgttcctggtcagggcgagcatggtggctcatacttgtagtcccagctacttgggaggctgaggcaagaggatcactggagctcaggagttcttggctgtagtgaactgtgatcaccactgcactccagcctggatgacagagcaaaactctatatccaaaaaaaaaaaaaaaagaagttcctggttcaagaagcaattaatatatatataaacaaatataattgaaatagtttacattggaaacaacctaaatttgtttgtaaacaagctaagagagtaacacctctatatctggctttatcacttcacagataaaattttatagattaagccttcaagactttgaatagctggcaggtggacatcattcattcattcattcattcattcattcaataaatatgtattgaacatctcctatggataggtaccattgtaggttttggatggaggggtaagcaaaaccgacactctctgcccttttggagcttctgttgtaatggaagagacagattatgaaaaatttacaaagttggcgagcaaatgctatgaagaaaaactgagagctcaggcacaaaggcagcaacccttattttattaaagacttcttttttcatatgaatgtattttgcaggaacaaataattcatagccactcatgctttcatggatttgtatccacattgatactctgttaactggagtaactttctactgtaccaagtagatggttcttgaaatatttaaacatttcaagcaccctggctgatttacttcatgtatagtgtcactaatttaatgttaccttcctttttccttgatgagaaagatgtctaggaaatatgcccatagtttctttcttgaacatgtttctcaactgccctttgcctttacatagctcaccaagcccgactcagaatctgccctctgggtgcgtcttccaccagcttttctttcatcctgtggcagatagtatcctttctctctatatctgaacagtctgaaaaattgttccacattgtaaatttaaattctctttaattttttttcagcaattgtgttttctttcaatacatttttaaattttctttctaagctttgtatgtgtatatttaaaactaaaagcccttttcataactcatgtcattaaaacagaaccttgatctattttggtttactccagtacctcacttgactggtggaaactctacaagagatataaatagtttttaaggaaaaaggaatttcttaacttgggacagcaaaaaatttttcactttcctctggggaaactatagaaagaatcaatggttctatatatataatatatagttttatatatatctctatatatacacacatatatagtgagagggaggtacatacatagatacatatgatttttacatggaatatataaaaatggacaacactgcttatcaatgctctactttccacttatttattagagacaatcagctgttaagataaattaatagctactcaacatgtatttattaagtataaaagcttacatacaaatgtcttgcaaaataaggaaactcatgaaattctcagaaatcaataaaagaaaataaaaccataagtatttgatgaggattattagttcaaagaaaggaaatcagtgtaagccaaggtaaacccaaggctcatttcaaataaatgatcaactaactttggtgacagattagatttaagagatcaaaaaaggaagagacagagataactccagagtttgctagacaagaagatgatatgaatgtatagttaagggcagagagtcactggggcagctgggtgtggagtttgtgaaaggaacagaaatttgcttggcttggtccatgctgagattgaagtattggccgcccgtccagagggatttcctgactcagaggaagtgatgcccatggaatcctatattgcagaagacctaacactaccaaactgaaatcttctgtttgggttcacactcagctcaactattctgtggctgtcagtgagaccaccaccaaaggctaaacctgtgggccacaacacatatccaatctcagattagtctcagcacattgcttcctctccagtttgaaaaacacatagaaaatcacttccagtttccaaagtgaaaattcataacatttatcattcaagcaattgtataatgtgctttattctcgaaaataaatcttcaggatgcatttttaaatatataattccaaacaaattattatataagggaatgtttaaaacatttcttttgaactttcagtttgaacggctgaatgttgcacttcagagaacattggcaaagcacaaaataaaagaaagcaggtaagtcaaaccactttagttgtgtgaacctcttattacaatgactaatactgctactaatggccagcagttactgaatgtgtcagccctttattgaatcattgtggtatgtcagaaactggacttagtactttagctgatactaatttcaaagtaagtgcatctatttatcacattttataaatgattaaactcaggtttatatgaagtatttagaattttatagccgtttaaggaaaagacagagctggggttcgagcctgggtttttcagagccattattttaagcatgtagttataaactgctgctttaacaagctcctgtaaggccgattcttttgtactaattggtaacttctaaaatatttaacaacaggtaagtcatggatcccaaacaatcaagacttcctgcctgaaggatgctgccaaagttttgagcagggtcccagcaggtaccccatccccaacacacatctcaacaacatgttaatactttagtatctgcatcaggaggaggtagaaggatcaagtgcttaagaggagggggactcagggttccggggggtagcagctgtttattaatccttagggaagtgtttctgtattctcctaactagtttggttgcactgcagaacatcagtttgtttatactttttttctagtattctttgaaattttcctttaaagcatttctgaagaggcttaatataaagttactttttattttttattttttttttagaaacagggtctcactctgtcatccaggctgaatgcagtggtgtgatcatagctcactgctgcccagaactcctgggctcaggccatccttctgcctcagcctcccaaaaaactgagattaagggcatggacctaaagttacttttttaaaatttatttttatttttttgagacagggtcttgctctgtcgcctaggctggagtgcagtgcaatcttggctcactacaacctctgcctccctggctcaagccattttcccacatcaacctctcgagcagctgggactacaggcatgtgccaccatgctcacctaatttttgttttggtttttgttttgtagagatggggtttcaccgtgttgctcaggctggtctcaaactcatgagctcaagcattcacccgcgttggcctccaaaactgctaggattacaggcatgcgccactgcgccttgtctctaaagttacattttttaaatctgatttatttagtgaatcaaatacaatttagcacatttactgctgacagaaaatgtaataggggccaggcacggtggcaaatcccagccctttgggaggtcaaggtagacagatcacctgcggtcaggagttcgagaccagactggccaacatggcgaaaccccgtctctactaaaaacacaaaaattagccaggcatggtggcagatgcctgtaatcccagctaatcaggcaggagaatggcctgaacccaggagacagaggttgcagtgagccaagattgtgccactgcactccagcctgggcgacagagtgagactccatctcaaaaaaaaaaaaaaaaaaaagtaataggccccgtttttgattccctgaaatttcaaggtttatttggtctataaataatagaataaatactggtgttgaaatttgcagaactgaacattggagttttacaaaccagcactattgtcaggaatgttttaacaattcattcatctgtctcctactcatgagtgatcatctgctctgtggatcatatgtgcttgattttccttgctgactagctggtcccagactgcaggcagcaggaccaagccaagaaggggtcatggacaggtccagaaggaaagagtgtgaatctatgtgtctgacagaagctttgtttacacgagtaacatgagaagcattccagaacacctctgaccttaataaccagtcaagctgataagatagtcttaagtctctcactgtgctactgtgtctgtctgcttaagtccttggcagccagtttactcaaaatttattctcagggctttgtgttctgaatcgttcctacagcttcttgcaatactcagttatgatgtgtttccagcagtgtgcctcttaaaataatctcaaaacttaagccaacaataattatttttttgaaattttgaaatttttgtttaccacttccctgatgtccctaaatataaaaaaaagaaatctgattatacttttaaattttcttgatgagaactattcagttgttgaaacaagatttttgctcataagcctgcctgctgatatgttaagtggttcctctgtgcttttttagttttggggtatcctcttgtttaaagattttttacttcactttcttattggtaagtcactgccgtttttattgctgtcagtttgccaactgctgaacacaacttaactcttttttgtgctgcttattctcttctacgaattgacaaacaaaaatccaatatatcaaccaataaactgcccttgaatgaaggactagagctgcccccctcctcttttttttttttcagtgaatgagtgttagtatagccatcatgtccctcaggattggttgcccagagagttcttgcttagtttctttttctgggatcttttgatcacatcattatatgtatgaactcatgctggtgtgtgtgtgtgtgtgtgtatttgtataaggcacacatgtgttggctggtgcatgtgcaatgcttacacccacttgtattttttgaaggtgagggtaggaattgtagtttgaattgcactatgtgctgtttggacaaactaagcttcgctcatttggcaaattttgtcataatcactcatcactatcagaaatcatcacaaacaattaggcaaacatgaatcaacaagtcgtgcagttaaaactgcaaaaaaatcttatcaataaaaaagcatgctattacagtctcaatttctatgctgtaaaacaagtgcagtaattgcatgaagaataggtttctttcattactaattttttatacaaaatcaaggattaaagtttaatataatgatatctgagagataaacacagccttaaactaagaagcaaaagattctatgtatttgctttaggaaaatatataatattacttaaaagtgaattctatctgtatgtaggtttttcttggttatcagaattaccatcctcttcttggccacttcacatttgaggttgctagccagggaaggttctcctgagtacagagtctccttgacctacagtggagttacgtccagataaacccatcgtaacttgaaaacaccctaagtggaaaatgcatttaacacgcttaacctactgaatagcttagccttgcctaccttacatgtcctcagcaacttaaagtagcatagagttaggcaaaatcatctggcaacacagtgcactgtagagtaccggttgtttaccctcacaatttcatggccacatgagagctgtggctcactgccactgcccagcatcacatgagagcattgtactccatacctgtagcatgggagaaaatcaaaattcaaactttgaagtacagtttccactgaatacttacagcttttgcaccgatataaaggtaaaaaaaaaaaaaatcctaagtctgagactgtctgtattagtctatgtaaagttcactttaaaggtaaatatttcttatgaagaataacaaaacattctatgtcatatatattttggggttttccaacattgttctggatggtatatgtcattgctcctttctcataaaattgatagtcaagatttgcttctacagaaaagggaatttaaactattttctttctttctttctttcttttttttttgagacagtttccctgtgttggccaggctagagtgcagtggtggctgatctcggctcactgctacctctgccccgccaggtcccggttcaagtaattcttctgcctcagcctcccaagtagctgggattataggcacacgccaccatgcccagctaatttttgtatttttagcagagatggggtttcaccatattggccaggctgctcttgaactcctgaccttgtgatccacccacctcggcctcccaaagtgctgggattacaggcgtgagccgctgtgcctggcctaatttaaactattttctatcattgtttctgtatattataatctgaacttttagcatgtatttataagtttataacttaaaatattgaaatatttccaggaaatctttggaaagagaagactttgaaaaaacaattgcagagcaagcagttgcagcaggtaatagaattgtttatgtaattagaaagtatgccatatacctgtagaactcacattttctccaaaaatattcatatttatttgttggtgactcccagtatgaagtgttcaatattatgtattctgttaacgtaaagagtaactctttttgatactatatgtttttgtttgacctaaaacattttctctgtttatgtttacttgctgaggagtagataaggctagatgggaagctgtctcacagatattcacaggctttgatcttgaacctaactaactgttcctcatttatacatcaaaaattctactcaacaaggtaaaataaagaatgcttttaaaggttaggagcagtcatgggaaaaaagttaacagtattctcacattaatgattagtttgagagaaaaaattgatatgtgactttgtcttgctgtcctttccaaagtttcagtacatgaaccacgaggttgcatctttctaaaagtataagatattgataataataataatgactaacgtatattgaggcccccctaggagcaaggccctattctgaatataagccccacaacagtgctatgaagagggcactattctttttcccacattacagataagaaaaaatgtggtactcagagtgtaaagattaaaggagattatagaaagggaagatcatacagagcacccttgacataactaactccatctttaaaaaagactccattttgtattttgtagggcattttgccaacaaaaatagcatgttttatttaataaacaaatttaaaaaaatgaaaactacatacaacaagataaaaacacaaacacacttttccactatcagttctcaccagaggactctgtaactataaaaaattaaaccttcaacaactcaaaacggtcgtcctgacaccttcttacattcactcgtgataaaaactggacatctgccaccaaaggctctgccatctcaaagagtctttcttataagacggcctgacccaaaccaagactccttttgtcttcttcaccatacccaccctcctttgttaattctttctcctatctctttttccttttgatgttaagtgttactttgttacaaaatatttaacctataacatttatattttctatattaattaagcatactattatgtatcgtttacaatactaactgatttgtggagtgacttgagcctgtgtgcctgcagctctaagaaacaagtaaacagaaagtactaaaaaaactgcctcttggcaaggcatggtggttcacgcctataatcccagcactttaggaggccgaggtgggcagatcacctgaggtcaggagttcaagaccagcctggccaacatggtgaaaacccgtctctactaaaagtacaaaaattaggcaggcatgctcgtgtgcacctgtagtcccagctactctggaggtgaggcataagaatcacctaaacctgggaggcagagcttacagtgagccgagatcgcaccactgcactccagcctgggcgacagagcgagactctgtctcaaagaagaaaaaaaaaattgcctccttaaaaacttcatgtaactcatggcttttatgataaaaaataatattaataaaagcctaacattgtaaaaagacacagacatacagaggcttatttctaaccttatagcactcgtgaaaatgctatagaaagtaaattatatactccaagcagacattcattcagctaacactaaacaacaagaatgcgatttgattcaggaaaaaatgctttgtaatcatttctagacaaaactgagtttcatgccagtaattttaaattaacttccgtgtctgacccttttgctgctggaaaccctcatagaggaagatcctcttcatgaggatggattgcttttgttgttaacagaaagattggaggacttttgccaaaatgtacttaatactggaattcaaattattcttttgtagttaggtttcagggagataaaaagttgtgtattatactcaaccggtcattcttttttaatgaactagtttgggatttttcttcagttactagaattttagaagctaacctaggtagataatttggatataggggtttcattttggttggaaatgttattagcagatataaagggagctaaatcagcaaataacgcaagttgaaaataggaataatggcacagctttaccaaggtggcatatttgatatggcagaacatgtattatgtgatttcaggagttccagtggaggttatcaaagaatctcttggtgaagaggtttttaaaatatgttacgaggaagatgaaaacatccttggggtggttggaggcacccttaaagattttttaaacagcttcagtacccttctgaaacagagcagccattgccaagaagcaggaaaaaggggcaggcttgaggacgcctccattctatgcctggataaggaggatgattttctacatgtttactacttcttccctaagagaaccacctccctgattcttcccggcatcataaaggcagctgctcacgtattatatgaaacggaagtggaagtgtcgttaatgcctccctgcttccataatgattgcagcgagtttgtgaatcagccctacttgttgtactccgttcacatgaaaagcaccaagccatccctgtcccccagcaaaccccagtcctcgctggtgattcccacatcgctattctgcaagacatttccattccatttcatgtttgacaaagatatgacaattctgcaatttggcaatggcatcagaaggctgatgaacaggagagactttcaaggaaagcctaattttgaagaatactttgaaattctgactccaaaaatcaaccagacgtttagcgggatcatgactatgttgaatatgcagtttgttgtacgagtgaggagatgggacaactctgtgaaaaaatcttcaagggtaaggaaaacataatactatcttgaatatgaaagctatttcatatttaagagcaagaaacaaaagggtaaaaatatatgcatcacttcaaatgtttgataaaacatatgtaaaacaatggtaaaagaattgtaaagctgtaataaactgaaaacaaaattctttctgcatttgtttgcttacttgattcattactccaaaaatatttattgaatgcagtctgccttttaatatctttatggaatgttttataatgaaatttgataaatgtttatataaaaatgttttcaattatcaaatagctgacttaggttgaataataagaggtattgttttacaacaaacaaaagtcacttgtttcttgtaggaggcaactaaatggatttttaatcaacatttaatagacatgaaaaaaacaaataatttatttgattaattgttaccgaatgtggaagttaaaacatattctgtcatctcatggtagagagctttggtaattatttagtctcaggaaagaaagtttgctaactcatagttgataatacaagcaaagctaagagagaagtttcacacatgtataactttaacagaagcaccatttgttccccaaaaggaaaacagctttattattgcttttctatcataaaaataataaaatatattgagatgtttaaaaaatgagtaatattgaaaggtgtttattgtagcaaaaaaatgaaaaactaattatatacattttttgtttaaaacaaaaaaatgctattttacaactgcttttatcatgaaacagtgtattttgtgcatcctcccatgtcattagatataggtctatttggctttcttggagtcttagtggtatcccatcatatggttgtgctctattttattttatttatttagactgcgtcttgctctgtcgcccaggctggagtgcagtggcgtgttctcagctcactgcaacctccaactccggggttcaagcagttctccccgcttcagcctctcgagtagctgggattacaggcttgcaccaccacatccggctaatttttgtattttttatacagacaaagtttcgccatgttggccaggctggtcttgaactcctgaccttgggtgatccatccgcctcgttctcctaagctctactttatttaactagtaccctactgaaggatatttgggttgcttttggctttttgctgcaagaacacacatgcacatctttgtccacacatgtgcaagtaaaccttcttgtggtccaggatgatcacttgaagccccatctctctcacgacagaaaaaaaaattaagataaaaatcttacctttggaggctttttcacttccatacctgccagatggagcaagtacttatgggagaagtggggaagagaagagaaacatgctaaaagagaaggaagccaaaaaaatagaacaaagaaaaaagtaagagggagggaagaaggaagaaagaaaggacacattttcctgactaccatattatacaaaaaatagaacttcagattaatcaagtgagaccattaagaagaatatagtagcaaaagcatcagcatgctgcttagtgagaaagccttgaagcaagagcgttttgcattgttcattgtaaatcttgatttctgtgtagagtatactctaatatactcttcaaacatctgcacgcattttagaactcatagaaaataggaactataagaaagcaaattgttccttttcagcaggtttaaacacaaagggtttattactgtatctacttccccttcttttgtctcagaaagatgtgggaaacttgaataaaccacaattggttatcctttccttcataggttatggacctcaaaggccaaatgatctacattgttgaatccagtgcaatcttgtttttggggtcaccctgtgtggacagattagaagattttacaggacgagggctctacctctcagacatcccaattcacaatgcactgagggatgtggtcttaataggggaacaagcccgagctcaagatggcctgaagaagaggctggggaagctgaaggctacccttgagcaagcccaccaagccctggaggaggagaagaaaaagacagtagaccttctgtgctccatatttccctgtgaggttgctcagcagctgtggcaagggcaagttgtgcaagccaagaagttcagtaatgtcaccatgctcttctcagacatcgttgggttcactgccatctgctcccagtgctcaccgctgcaggtcatcaccatgctcaatgcactgtacactcgcttcgaccagcagtgtggagagctggatgtctacaaggtaggagtggaccagggaaataattgttttaccagcaaactcactggggaacaagcactgtgcctaggacctgaattataatgcaactgaaaggccacctctgtagggtcttgcaagcccagtcctgggagcaggtatggtgcattcattatgtgggtgttttccagccagcaatagctctgaatctgcccagaaacagagataattgttctgggaggactgccacactgtcctctcaaagaatgaggagagaatggagggaggatagggtgctcaaagaatggaggatggggtgtaggacctgtgaataggagaagtttaatagtgaatctgccacttcactgtggaaaccgagttgaattattaagtgtgagataattcaaagtatggcttatacaaggaaacattatcctttgtatctgtaagagtaaagacacatgaggattataaaaattgcctttaaatagattacttcaatatagagttaacatgatacttttcatggccagttaacagaaatcaaaatcacctacttaaggcatttttgcagcttggccaagggcagagacatttgaaaaagaaagacctatcttcaaatcttgttctctgccttacttgctttgtaaactgaccaagttaaaaaacctttctcatcacttctaagacagagaaaataatattcactcacagagtttatatgcatgaataacacacattatctcccataatcttcatgaacaggattgttataaagattatgttaggtaatacatgatattcatcagtcatacaggatgagccaggcatcattgtaggcactggggatacagcagtgaccatccctgataccttttctttttaaacgtaactactattagtaagagagctaatgaagagatttcaagttctgcctgcttctttagaattaaaagtttttactgatttaaattactttgctttcttttagacattggcactaagaataaagcgtatttctcatttgtatggcttgaatcatcttctgaacttgccacataacaatctgacatttcagagctgaacccaacaggaaataaataaattattgtggaagaaacgaatattattcatgataatacataagctcttgtcttgttttattctagatgccagaagtaaaaccttacttttaaaaattcctaacaggaaagtccaaacagagccatgattcccttggggaaaaagaggtccatgtatacttacagaaaaaataattggcttcagttacgttaagtttgatggcctcttgtggaatttactatatttatttgtagccattttctatcttgagacggtctcctgtcttagaattgtgagaaggaagtctctcttccttgcaaactgctgtaattgctaacagaagtagccctcttctacttttggttatttctatcaaggatatagggtatagtttttaagtatcctgacaagcattttgaaactatgctcctcactgtaaggtataaggacaacagccacagagttccctgattaatctaactagagttgtaactagatagtaaattaccttctatgccagccctcatttctacttttttttcacttctgattttgcttgagattacttcgagatagctgaaaataaatatagaagggtttcagatacacaaaatgtataatcgtagcctaccctatgagtgccaatggctttgaaagaatagtcagcgttatttattccaagactggattatactagggctttatttaattttattttctctctgtctttcttgggtttttggccatttttctgtttctctgtgtgttcatttacccattgtttcagcgaatatgtactggttatccagcatttgccagcatgggtgcgcagtggctacagagctagagggtacaatccctgtgaggaaagttcacatatggagagggagaagagggcacaatggaccaatgccagatttccatatgacgtgacgaagggatgcagtatgcacaaagggctgcaaaagcagatatggtaggcccctaacatcaggtaggggtgggtgtaggacttcttctaattagcctatttattgagcacctgtgatggccatcatgatgagcacttcttatgtactcattgctgagaaaaagcttatgggtggcattgccacctggttcattcattactgggcacaggtaatgtaggagtcaataaactagataaactcaaagggcttacatatgattaggggaaacaaagacaataaacaaatgagtaaatttatagtatttaagtcagtataataatgtgaaagaaaaataaagtaggttaaggggaagaagaagggcagtgggtaaggggtgattgctatttcttagagggtggtaggaatcagcttttctaataaggtgaggttttagcagggactgaaggaaaggagggacaaccacgtggttatctgcagagagattgctccaggagaaaggaatagcaagtgggagcatgtttgatgtgcttaaaggataatggaaggcagtgacattggaactaagtgagcaatatggagaataagaagataaagtcagagattaggagaaagacaggtaaagaagaaatctggagccataataagggtatcagcatctactctgaggggaatttctgaagatttgtgcctcctttcttttttcctttctcaccctcatcctttcacaattgaggctttgtgtaagaataatagggtcttatagttacaataaacatttggagaagaagaaaaatgaagctcttagaattagggggttatttctggactaaaattaactatctgctttttgcagccagcatcacagacagataaaaattgcctgtaacgacaacaataatgatgatgataatgataaggttaatacttagatttttgataatagcttgatttccagtggtctttcaaacaccaccgttgtttttacctgctggttcaacatcttggtttttataattgtgattagtatccattagatatgtaattgctatgaggaccccaagggtcctttagaagaaccgtttctctttactcttatgactattaatatcttggttttacattgcacaattttactgcattgatgtgacatttattgagtagtgacttgaggcaaaatactattttatgatgaggaggatataaaacgagtaaatgatcccaacatctttaaacaatttattataattcaaaaatatattgtttctacaaaaactatcttatatggtgaaaaaaaagagatgaaatgatatgatgagtcagtgtgcaaatctgggagtagaagtcaactgttactgtgttcataggactgtactgcctctcagtgcagtgcctcaatgtaatgggtctaaaccttgcgcatttcctgaaaaagaaagccatttctgggcgtatctgattaaccctgatcctccagaaggcctgagcaatgagaattctgctatatgacttaatttcttctatccgatgtaggctgtgattcttcctgagcatttatttatagtatggaaaatatattatgtctaggtggagaccattggcgatgcctattgtgtagctgggggattacacaaagagagtgatactcatgctgttcagatagcgctgatggccctgaagatgatggagctctctgatgaagttatgtctccccatggagaacctatcaaggtaaggcagatgatatattgtccaaaagatgtcacaagagcaaatgcgtatagttgattaccaaaaccatggtgtatcagttgggggttagttgagagagagagagaaagcaaaatctatatagagaacacaatcttctctaacttgtttacattggaagaaatttattatagggtattaaatggcttacagaatcattgagaggacagaagaacccatctataagttgggctttcaaaaaatgtttcccatagtatagggattttctattgtcaaagtaaaatggcttctaaaggcaaacttcagaacaactgcattttcaaaaatctggaagctgattccaaaactatcctaccaaagccacagtcaggaaactgccatgttcagaaagctgctgcctcttcaaaaccacatctactataataatcagcaagatggcaatcctgcatcatgacttacaaaatgagtgatgggaaaatggactctctactaagcatgctatagaaaacacaaaggcttccacaattgttcttgagttatagtggagattgtgcctgccgaatctcatgcaactgtgcatctgatttaccaagcctaactgcatttagaagctgcaagttagtttagaaaatgtagttttagttttccagcccctggaggagaggatattacatttgaatggatgttgactgttaattcaccaatattttccaaggcacgtgacatttcaaaatttctagatgagccagattccagactaatatctcaccacacatgaggaaataaagttaacatggtaggcattggtttaacagatagaatataagcagattacctttgtctcacagtgaatctgccccttaatttttataggacagtcctcagttgactaccttcagaaataagcctttgaggtattgtaaaatcttatccggtatgctataaaacatatagagaagaaagaagaaatttaaaaacaaaactatatttggagatttacccttaactctctttaaccttaatagaagccatatgtttaagccttcgtaactattttctaagtctattgtcatcccatttatatgtttctgtgcaacatacttttctaaatttaatggtataaaatcacaaacttttattatgcgtggattctgtgcatcaaaaatttggataagtcatagcaggaatacctcgtctgtgctctacaatctatgggacctcagctgggaataccgaaatgggtgagggtgcctggaatagctgggattgcaacgattgaagctggaggattcattccaagactgctgcttcacttacatgtcagattccttggtggggatggctgaaaggttgggttcagctgggattgttagcgttacatgtgatgccctaatatgtattttttatgaggtggttcatgtcccactgaacaagactggtggaagctgcatgacttagtcttggaagacacaccgcaacacttccactgcactctatcagccagagcaatcacaagtctgcccagaagagagagggctcagagcccaagaatcaataggaggagtgtaaaataatttgcaagtatgttttaaaagcatcacaatatctgactttttcagatttattttcgataattgcatttttttagaggaggactatatatttctttctctttctaatttgtttgagggggcttgtagcatcaatgtaaatgttaaaaatatctagactattaacaacattttaagtgattttcacacaaatacattttataattaagatgtgtatgtttggggtgggggaatttatggcatttttgttatttgcagaaatgtatttttagatttttctaagttggaagaattatttatagctagtttcaaagatagttacctgggtaatgatagattagtttaaaagacctataaagggaatcattaatcatacctttttatgcatactaacctgcagccctgggaaatatctgacgtccctaaaagataccggtgaaacatcacagaggcagagtggagagtatttttagtagggaaactttaacatgtatcagaaaggagcatattgtgacttaacatcgtctcatttaatccttataataacactttaaagaggcatctacactggcagacacgagcagtcaagtctcctatgtgtcagtatttggagtcatgtccatgtgacttcaaagcccaggctttttctgcttcttgccctgctacctcttggtatagaattgaagtgaaagaatagaaaatattttctttttttatttttcaaactctatgctttcctttagcacgtcacatgtgcaaatcattcatctattcatttattcccattgatttcctcactaacatccatccagtcaggcttagaaagcagcaggtgggttggtgacagagaccagtgggctgagtgtaaccgtgaaagtcagtaggtgacaagtgaacacggaagcaaacttctagtacccctcctttcctaagcctagaagcttatgatgagaaatgggctatgccacaagtggtctcaaatagaagatgcccttagtaggttcccattcaaacttttcccgggagccagaattctgcctttgcctttcattatttcacagggaagtctgttaccagtgaaaagagatatgctcagggcacgatgtgtgtcttaaacacgttgtgttttaaatcttgctgatgaatttgaaaagctctgtaagaaaatgttagggttgagagattcaaaactggagaaggggaggaaggcagcacggcatggaaggactaggagggacacttgccttgtctgcatcgtttcggtttttacgagcagaatatatttacattttaattatgaaacaagataaaaatgctatggtaaatttaatatataataagctggagtaactaagtataggaagaaaaactggtttaaccagaagagtgctcacagaaagcaaaaattcctcaatctaaatatgctgaagtcatagttgatatttatgagcagaagagctttattctatctatctatctatctatctatctatctatctatctatcacttgctaaatgtgtaaattaatattctcctaaaagagacaaagccagatatataacagacatctaagttttgcttgttaaagtaaaactttgatgaagaaaggtctttaaaaataatcaaacccctgcattttataggtgaaaacatgatcggagggaagtaaagagacttaaggaagccagactaccagttactagtagagcttgttagaatacaaagttcctgattcacagtctagtgcttttgtttgaaaattttgtagaactcatatgacatcttaaaagtaaatgagtctggaaagtttctagcagatatctgaaattagttattaaaactagacataactgaattcttctgatttctaaattatatccaagttactgagttcttggtcttcattcaaaacgcatacatctaatacaactttttaaaatggttgagtaaacaaagagtttgaaaataattaacatggtatcatcatcatttaaaatatctccactttagcttgttttgtagtagcagtaatttaagtgtttgtgaatcttttaagatcatcaagtaatcagacctttgaagattccattgttaaatatcctgctttggctaggcaaggtgacttacatttgtaatcctagcactttgggaagttgaggcaggaggatcacttgagcccaagagtttgagaatcagctgggcaacatagcaagaccttgtctctacaaaaaatttaaaacttatccaggtgtgatggtgcatgcctgtagttctagctactcaggaggctgagatgggaggatcatttgggcccaggggttcgaggttacagtgaactatgatggtaccgctgcactacagcctgagtgacagagcaagactctgtctctaaaaaataaataaaataaaacattctgtctcagtggctttccaaatcattggagacttccagaattcctaaaattttgccacaacacatcccagactgcctcttatatctaggcatggcacaaatctgatctttcatcagtatggatttttaatttcatgtatatagacattgtcatcgtcattggactcaagtaccttccactttctgcttcctctgtcattttctgcttaaatattacaatttcatttcctcagttgtaagtcattagaacagtgggatagtgtttggtataaagctattttgaggtaaaatgtctaaaagatatatttaatatccttagagctagcttcatttgcccttctttgtcagtgtttgggaaaatgattccaggagtccagaaattatgtctatctcacttgaatgagaggtggcagtttcacataaacagctcatatcccccttgctatgttgctgtggttactatgatccctgtgcatggaaacttgtttcagatgttgaagacagacacaattaagatggtttgtgtaataaacctaaatggaaaagagttaagaagtgtgactgttgattctgcactagtaatttttaattgcatgtgaggagtagagggaagttggctgaaggttttgaggaaaggggtggtgtcctgagggtgaatggtaaaataatttagacggtattcaaacgacactgacgagtaggaagtgttttaccagtgactgggaacatcatgttattttttgctttcagatgcgaattggactgcactctggatcagtttttgctggcgtcgttggagttaaaatgccccgttactgtctttttggaaacaatgtcactctggctaacaaatttgagtcctgcagtgtaccacgaaaaatcaatgtcagcccaacaacttacaggtagtaattatgttaaacacctaaaatctcttgtttttatttatatacaattgccatttgccccactgatttgattcattcttcataacttttttcttccttagtcgtaaggaaaaaagaaacgtgataacttttatcatcctcactttaacttttttacactgcttattagcctcctaagaatgacttgcctgaggtgtttgtggcccagccataaatccatgacagatattacatagtcttccatcattcttcttttagaagcacatattaatactcttagtatgttgataggtgttctgacatcaactagtacactgcagtgcagttctggcagtaaacacccagactcagcacagtcataaccacaagttacagggcacagaacccaacaagcctgcccttaattcagatgccagccacccttcaggacctaagtatgcatttagacgactgagctacaattttgggggttcccatgaacctctcaagttagataattatctaaaatgactcacaatacttagggaattgctatacttactattacagttttatttcgaaggatacaaatcagaaccaaccaaatgaagaaacagtttgggtaaggtttgggagggtcccaaatgcagagcttccatagaatcagaacttatctccctccagccacctcagtgggttcacaagccaggaagctccacctgattgagctttgagtttggtgtatggagtcttattgttttcattatgtaggcatgattcgttgaatcattggccatgtgattgaactcagtcaccacccccactctcctccccagaggttaggctaacacaaaaccccaaccttctatccacaagattgatttttctggggccctgcccccattctgagtcatctcattaatataaactcaaaagtgatccaagggcctcatggaaaacagatactcctataactcaaaaaatccaagagttttagaagctccctccctgcaatcaaggacaacagccagtcaaattccctatcatacagggaagaatttaccagaggaaaactagctggtcatcgagcacttttcaaagattgcagttttatggactggcagcaagtgttaacacggtcagaggagccacgtgtcatctagcatcagaagaacctttattttcactgtcgccttgacaacatgtagtatacagcctgagtcaataaaatctaccattttgttatcacttatccacctttaaccggaaaataaaccaatccgtggtaactagaaatatatctttcatgtacattttgtctcattatattggaaactcttaagtaacaaaagagtttttcagatctatacagtagctaaattatactaagcaagttagctttcctattctcagagataactctttaatagcatcttctcccttcttcttctgcatttatttatttatttatttatttatttatttatttatttatttatattttttgagactaagtcttgctctatggcccaggttggagtacagcagctcagtcttgcctcactgcaagctctgcctcccagtttcaagtgattctcctgcctcagcctcccaagtaggtgggattacaggcgcccgcctccacgtctggctaatttttgtatttttagtagatactgggttttgccgtgttggccaggctggtctcgaactcctgacctcaagtgatctgcccaccttggcctcccaaagtgtaggattacaggcgtgagccaatgcacctggtcttctcccttcttaaggcaccagcatcctttcctttccagcccagactctcagttgataatcttgcctcatatttcaccaccagaatagaagtcagacaggagctttgccatctttgtgctgtaggttctctcagcagagctaccccagtactcatctcctccttctttgttcccattacattggcccagctcccctcctgcccctggttgatacagttttactctcagtgctatttcctctcaccttctcaataacttttctgtggaaattaactctctatgatcaatttctctttgatgaaatgattattcccaacagaatacaaccatatctattaaagctctgaattgaaaaataaaaaattccttgtttccaagtccggcttctgctacaattttcaatttctgctctgttttatagcaaaactgaaagaagttgtctatactcactatctgtattttttccacctcttattttctcttcaactcactccagtcagtgtttactccactcaaacggttcttatcaaggtcatcattgtgccctgctaaaataaaatcactgtcagttttctctccttatcctctcagaagcatttgaataggctgagaactccctcatttaaacattttcttctttaaatttttggcaccacattcacctagttttctcactaccccatgtctacaccttctcagtgtcttctcttggtactccttccctaccaaacctttgttgccgtgctcagagcctcttttcctgttatcttctgtatctgaacttttatgactctaactattttttaaaaaaaatctttcgcccatcctgtgattctctgcagagctacagactcatatatcctattccatatttccacttggatgactaattcacatattaaaatgaactggaccgaattagaatgagtgatttcccacacagactgatgaaatccacttcccacccaggcaagcttaccaatcaccttaaaatgatatcaccatccacctagttactcagaccatcgaccttacagtgatcatttcttctcctctctttaaagagacactccttaactatcataactatagcaacaaccttctcctcacataccctctcattatcctatttcatcttctcagttcacacctgtatctgaaattgtcttatgcagtatttatttatgtgttgattgcctgcctccctttttagaatgttagcttcctgtggtacacattccatattcccagctcctagatcagcgcgtgaaacacagaaggaaagcaagaagtatttactggttaactgttgactcctgggtatgaaaacaactcagtataacctgagaattggaaaaatccctggggttcattgtaatggtaattggcctatggtcctactgggtataataggtagggataagaatccatgccttgagataatatgattctactctctctgtaggcattaagaggaatcatcctattaagtaggagtcagttgcccatcctttcactgacacctgtgtttctctttcaatgttaagtgatgtgttatgtgtatatgtgcatactgaggaatcctaccttaaaacaaaactgctacatataaaaagcatattttcctttttcttctatattgattgtttttaacagtatgaaactaaactttttaaattcttgcattttgtatctcaaagtctggtggtcttgagtcatgttagggggcactgatattagctacttatttttcttcaaaatataattcaggatctcatgtatttcagcagaggaccacaacatgttgacatatatttctgacaacaggacaatgctcatgacttaagtcttagattcactgtattggcaatgttactagaaatgcacatataggtttttatagcatagatggtgttatcttttaaataaattttttattactgtggtaacacatgcccatttcagaaaatttacaaaattagtaaattataaagtaagtaataggaataagtcataatctcattacccagagatagtaactattaacatttctgtctttgtttcagttacgtttatatacacatgcatgaatgacattgaaattttaatttaatttatattgaacttcagctcatttgctgaagtcatttctactttttatagacaaatatgatatagcttttttccttttgtattgatttcaataatagtttactttctttttattctcgtatatgagatatttatgccttgcctaagggaaagcagtagttaatactgtcttatttaggcaaaatataaatacttaatgttaaatacttttaacaacattttaaattcctttctttcagagatacttcacttttcttccatatgctgggaaaacttaaaataatataaataaatttcaattaaacatccaatgctttgggaaatttagtcaacggtaggggcataattttagttttactcaaactatagtacaagaagcggctgctaaagaaggtgtacaagcacaaaatgcagttttctttggagagctttattgatgatacattaaattctggaatgatatttctttaataataaaataatctgtttaatattgaatgtagcttccatgatatatttctgaaatacaggtaaatttaggacacagaatacatacctataccaaaaaaaaacctgtatcttcaaatttccacttccaaattctaatcagtgattcagaatgtagcagtgtaatgacagttatacactcctgttttttaaacattgtcaggagttttactttaattttaggggataatattcgacattttgtttgcattcttgaagtaaggaaaactaatagagactagtagagactacattagatcagtgagtcagtggatccaggtctactacattagttccaggtcagtgggtcaatgttagaggattatgtggtgatccagggatcattagaaacaaaaatggcaagtggggaggatacatggatgctgtccagtttgtggggtaaacaggcctagaatctcttatttgtaggacaagtctgagcacattgtgctagagaagcaagaattgacttctgtaagaagaaggaacaaagtgaataaaggaatataggaaagataacagagaattggagcattgatgcagtaatttgcggaaaaatggtgtctggtgaagaaggtgtagagaaaaatgtccacctatgaggacatctgggctgttgctgccttttttgggtgttgctatcatcaagctttcatcgaaatggtttgtttttctaaatggtttttcttatatattctgattttttaaaaagacaatataatgaacatttcaaactccatagcattctaattatgtttgtctgttaagtgtctttaaaaagcatagaagttgtattcagaagacatgccttagagtcccacaaacagcacttaccagacgtgcaatctagagcaatgcccttaataaattcaaatgatgcactttaaagccacttctaaaggctgaatatatgtatataatacatttaaataggagattataattgtcattaccgtatttagtaggaaatgttgagttgctgtagatagaaaaaataatagataaatttttttaatcacctatagttttatacatttttatttattagactcttatagttgcatacatttttgtatttaatttttaaacatataaaaaaacaaagcaaacaagatgacactcatgtagccaatactaatatttaagtatcaacattttgccatatttctttcaggtttctgttttataaaaaaataaaatgtaaagtaaatagatattaatataataaaatataaatagaaactcttacatggtccctgttacacgctctgacacaatggatcctaagtgctttatagcttgtaggagctgagaatatgtactctctgcagacagtctcccaaatacagatgcatgttcagcagcttctccacaactcatcaataagatgtcacttctgctttccaggaaggaaaatgggtagagagaggcaggaatatcactttcatttaggtcctgccagatagaaaaataaagccagaggaaaatagattcccagtgaacatatccatatccttttaagacttgccttgaatccactcagtattatgtttctgagatagtttccttgataaaatgtaaatctagtcataaatctagattattcattttaactattgctaatggagtggtttgctggtaaaccagctttggaggatgaggtagagaatccatgattccagcatttgccaatttctgtggtgttactatgtccactctggcaggtttcaggctatggatggcttaactgtcttacaaagttcctgaattttaacaattggctctcacaagccagtatgaaccagatctagcatgttactatatgtgcatgtgatataatgtgtattctagagtatgaatgagccagactctatcttctacctgtgggtaattagagtgtgtccaatttttcattattacaaaaagtgattcaataggtatctttatacatatgtctttagataatataactaaaaatggtattcccagaccataggctatacccagtttcaactttaccaagcattaattagctgttcaaaatgattttaccaatctatgctccaccagtagtgtatgaagtgtgctattctccaaggtgatattgtcagacttactgttaccaatatgataggtgtggtgtgatttctaattgatgcttagtcagtttttaaaaattgatttattcaattttcacaactgtcctaaggaatatgtactattattatccccattttaaaggctggataatggacatctgtgctgctagagctatcagactttgaagcttatacttttaatactgtctaattctataccttttcattatgtattctcaaataatagtcactcaaaaatatttataaattcatgactaaggcatcattttcattagttttattgtttagcagattacatatttattgatgtactgatgaaaattaaactgtcattcttgagacagatttctattcagttggtttcttcaatacatagatgttgtcacagtaccaaaatctaattcaacatcatcattctatttaatgtagacatgacattacagactagtgagtagaagaccatggtctgtttgggtaaatataataaatgcttttctgtagaaattggttgagaacccacagccatgcaacatttttcatctatggcctgaatattaggttagagagaaggcttattaagttctcatttgatggaaagctagggaagcaaatggaaagagatgccaatagcttaatcagtaagattagaatttgaaataggtttagcataatgaacaagtagtaaaatagcaaacaatataatgtggtaaacagatgaatttcaggagaaaaaatattgctaataacaattagtaagtagagtggtgatatgtacaattaaatctcatttgagtcctactaatctagaattcataaaaattctattgaaagattcaaaagttgttctcacatcatttttgtcattgtaattttggttcactatttcttgcccatgattacgttttatgcccacaattagcataatatttacaaaattaatgaattgataaatggacatcttacctctttcaactcaggaaatcttaatactgttatggttatgtgtgaatactttgctactattaaatctttggattattttttcactactgcaaattgcactgttgtgtggatattatttttgcaaaaatattttataattttttccagtgtaagtgaaatacattaattgacacaattttcttgttgtgaattgattcttcattgtacttctgggaagatgtctgttaatctcgttagactttttctgtcactcacacctaaaatcactggtttataaatattctcagtaacattcagttagttatgttgtgttctttttttgagtggacaaacatttatgtcagtattatattttaatattttcagattactcaaagactgtcctggtttcgtgtttacccctcgatcaagggaggaacttccaccaaacttccctagtgaaatccccggaatctgccattttctggatgcttaccaacaaggaacaaactcaaaaccatgcttccaaaagaaagatgtggaagatggcaatgccaattttttaggcaaagcatcaggaatagattagcaacctatatacctatttataagtctttggggtttgactcattgaagatgtgtagagcctctgaaagcactttagggattgtagatggctaacaagcagtattaaaatttcaggagccaagtcacaatctttctcctgtttaacatgacaaaatgtatgtactcacttcagtacttcagctcttcaagaaaaaaaaaaaaaaccttaaaaagctacttttgtgggagtatttctattatataaccagcacttactacctgtactcaaaattcagcaccttgtacatatatcagataattgtagtcaattgtacaaactgatggagtcacctgcaatctcatatcctggtggaatgccatggttattaaagtgtgtttgtgatagtgtcgtcaaaaaaaaggtttttgaatagaaattacattctttgacaccctcagttctttcaaactttcaactctgcattttattgcattttctcatttaactgttagtatatgtttgaatataggctgactttttttctctattgcactttcttctttttttctttttagaaaataagcaattaggggttagatgcaatatgaatataaaatagttctgtaaataccaaatattatttttagttctggaagttaaaaatactctccatagtaacgtgtgttataataataaatatttcttttgtttgacttttttaaaattctacaatggtaaaagctattttaatccatgttagcaatttaattcctattaattcattttactatcataatagcaaagtattcagaataaaagaggtttatatcttctattaaaatgcagtaatactattcaaatctaatttagctggaagcaacatgggagtaaagtaatcatccaggggacccaccataaaggacattggtaaaacatttacacacgtaaacacacgtgcaggcacacttggaacaatatggacccacttcagcagacatcttctattgccatgctgagctgtttaaagttttaagaagaaaatctaagtatggaagtagaaaataagacttgttcttttggtggatatctcatttttcttgagtatttgtgctgaacattttggtgtatgtctatgaactaagaatcaagtttttgtctcattaaatatacatatatgaagtgtttttattctacttgaaatatcttgacttaaaaaaaacgactgttagtattgatgaagcaaatgaggcagtgactacattatggaaatgtctaagtattttttccggaacttcaactttttctttttgttttacataaacatttaagcagctaggaacttttagttttagttaggtcagttgaagttctctggtgaactaaaaaatctacattttggttggggataaagatttgattttaaaaacagcttgaatttaaagcaagaaaaagatgaacgttatagttttaaaatcaatattagcagagccatagataggctgagctcttatttggggttctgagaaataactcagtttaaaacttctttaactgcctcccttagtacccaggctagcccatggtgacatcagggatattcattactgattggcctctagtattccaagggtactactatagatattacaatgatgctgtttactaagtgataaccccgtatcttacaggactgactttgactcaataaaccactcagcctattattggaaagtgccataggccttgagaaagtatagttacatcctcacaaatatatgaagttaagtcactacttacaaggaaaaaaaatgtaaatacatttttctttctggaaccgaactcttattatggggaaataatagaaataaagaaaatgtaaaagcatgaaatggaatgtagtcttgatcaaacatttcagcagacctcaatttgcttacaatctgtactcaaaaagtttataattcaatcagaattcaaaaagtattttgtgtgtttgtgatgtattagcatatacacaaaacaaatgaggggaatgtatataatcttggtgaaaagttgtatgggagttttttgtacgattcctgcaacttttctataaacgtggcattatatctaaataaaaaattaccaaaaaacatattttcacagtgaagttaaatcatctgtgataggttccccagaccagcctacaaaggcccattaaatacagaataatttgtggatcttcaaagaggatgaacatacatttccatgacagagtccatacgaaattcacaatttagatgctaaaaaatttaaggaatatctttttttctctatcttatctgctttgaagcatagcgattagcgagaaacttttcagatccagaccactgatggtagccagagtagagaccctggagcatagattcttaaaataaataaggggcccaagtcagagctttgaggtattgaagatggaaaaatagtggacaaacagcctgtaatcaggttggggattacgggtactgagttatgttgccatttaactattctaaaaaataagactgggtctcaagactgcttccctaacagactgtttctcctgaaaatgcaggagctattctttctgttctggttatatagtttccattcatggcttcttgtcctgttgttttttgtgtcgagtacactatataaattatctccttatacatatttctcaggcaagcacagagttatactgaacttttctaaagatgctttgcatcaagaagcaaagggaaatacagaattaaaatgtttctttccattttgctttgtttttctatatcgatctagactttgtaggaaaatgcaaagcgtatatttaagaaaacctaaataagaatagattcatttactcattttcatttattcattcatgaagaatttattgaatgcctactatgtgccaggaatattgctatatttttgaaatttaaggataaaatatggcccaatctatcaagaaaggaaagtgaaagacaaatgtaagacataattacaacattctgtgggagcacaaagtaggggactcagttcttagagaagtcttttggtcttagagttcatcaagcagagaaggggaaggacatggtccaggaaaataaatcagcacacaaagagatggggtcttgagggtgcatagtacattctggacagccagttacctgggatgagttgggagggaggagaataaggacaaaagaccatctgggcaaaaatcacgaaggggtatgtgtgtcatgtaaaggtgtgccatgatagttattcatattgctattgtaatattaatatatagtaattaactacacatgacacagctttacatgaccttaagtagttatcaacattaccataatagtaatattaataactacaataagagccattattattcacttgaggcacttgttcaaaatagattttacaaaagaaaaaaaaaaaagaagcaacatgagtaaaattagatccattggctactgactccctctccaacagttttaaagctactagataagagaagcatcaagtcttaaaggaagagaatggtatgatcagatgtgtgttttccaaagactattagaaacagcatggttaaggatagggtggatatttacttgcacaggtgactgaatgaacatctgtttatacatcaagggaaaatgattcattttatatcctggatattttaccataagtatgagcataaagctgggatgtctggcattggaattttatgtcactctcaaggctaattagtctttcagatcctttggtagggaggaaagaagagttgcttcagcattttgactaacatttcttccaaatttcttctccctgatatttccagccacgccaaggcaaagacttcccagctctgtctcaggttaggttaaaagaaggcataggatggaagagggtggtctgtggtaggcctagcaaatgaaagagatgaataaacaagagtgtctagtctaactagtgcctgaggaatagacatcagtcctctgagattacccagctggaaaactgcccagatggagctttacatgcaaagctccagtgaagtctagtgctgtataatgctttaaatccacaatcaagcccttgttgatgcaaatgttagtcgcccaaagcagaatgggttaacgaattactgcagtggttttaggtgcatgggtttgacccatgtaaatcattttaataagtaaaattgaatctttgatacatatttgttgaggagcttgtcagatcactacctttcactgaacagtaaaacatggatcatttatttcacctcattttgcacttcaatgcaatttcactctttaggtggttgtacttggacagttaaatgaagactgtctttaagggtgcagggatggagaacacagcatatatgagaggtgggagggcagagacgccttgcgattcctgtgaggagggacttaccgtctcctccaaaacagaaattcagtgctgcagagacggtagcaaagtgcagttctcttgttaaaacacaggctaaaagcagtgactgcttaacttattaagcagagaaaaccaaaatgtcattttcaaccaaaattgagtgttagagtttatggtctctgttatgatacttttcaagacctgggaaatatttgtatcctttagtgaaaaggggaagaatcaattactgaaagccataagcttacagtaacggagccaattaatcctttgtcatctttgttgagtttagttttcttctgttcttagcacgtcagctagtagatctttgatgaactgttgctcctctttaaatgtttcttttattatattgatgatgtgcactcattcagtattcttattttaagctgcagtaatcactgtacatttgattgccatctgtacttcccttgaagcagctttgcttattacagccacacctgcatctgttttgactagcccacataacctacacatttttcatccaaagctatcccattaccttatttatgtccatttattttcatatatagtatctgccaaaatagtagcaaaagttttatcaatgtgtagatttcaatcagaaaaacctaagcaaaaggaaaaaaaagtgatattctaaaagccacacttcttttatcaccagtgcagttttttccatcatcataaacttagttttatgaaaatgttaatatcttggatttaaacattggggtagaaatcaggacaaaatttaaatgtcatatccaggacttaatctcagatattctggtagaagatatttagataaggttgtggctgcctgtcaagttttttaattttttaaattatataatgtcagaaaattaaatcacaaatgagccttccagattgtgaggaaaattacttggctgaaaatgactttgcataatgcccaaatcttgaagtatctgctcagatgtttgttccatctgaaatgctgccaaatccatctgtattgaggaaagagctatgaggtagtttcagagaaagtgaaaacaaaacaaagcaaaacaaaaatgctattacagaagttggacagcccaatgtgttaagtattatacacctggaacaagagcagcaaaactgaagctctttggaaagttatggcaacagtggtctgggaattctgggcctttagaaataatcattcccagtgatacagggatgtgcagcatccagacactgcttaatcacagtgagctgccgtcttccctgaataagttgtatcttataacattgaagtgaatgaaaatgtattagtatttgagaatttactattccttcacctccttgcacatgtaaattaaagatgttttggaaaatatgagaacttgatgttcactgccctagagcactattctccaaccttttagattcctgcaatctgttaataaaatattgtaggacaacaactctatagactgatacatgctgctctcaatccatatactacatattaggacagcttttcttttctaaatgagcatgaatataaatagaaattctagtattttcttcacctaccccagtgaatcatctttatattttacttgggaaactgctacagttggctagtgggtcttcacttttattgctttgagaaatggataaaagacatagactatcacccctccaaaaatgtgcatatggccccatacaagacacatgtactgccagagcttggggaactccctagaatctactcctagaccaccctagtgaagtaccatagaccatattgtctagatgggacaaaataataaattttgactaagaacttactgtttagagagaaaaaatagtaaataatgttcaaaatgagaagacaataactgacaagtctgtgatttttgggttagatgagaccacttttgatttttgaggaataaaaggagttagttttttggtcctgatgtgtaaaatgattcatggggtttcacatacagacaagtagttttcttttcagcaaatatttaacatatctctcaatatatttttcaccagtttttggtaaatatgcattgctataggtataccaagttttttttgttatgtttagtaactaatttcattttttctgtatatgtaaatatagctattggaccctgcattgaaaaccttcttagtactaacaacactccttttattattaccttcatagttactttaaatgacatatttatttcgagttttacttctggctgagttgcaaagtctatgagaatgttacctcctgtctcagaagcttgttagttattgtgccacctaaatattgtaataaaagtgtttaaataaaaatcttcttaaaatttaaaatga

SEQ ID NO: 55 - DNA, 71647 bp, Homo sapiens
gtgactgaggacccaacagtgtgctccttgcttggaggctagtgatgagctcctaatttcactgtggactgcccagatttctacaagacaggcttctggagacgctgtggattctctcctgagtgactaggggctggcaggaagggcgggcgcttggtgctgcatctcaatccctgtggccccaggagcagctgcggcaggaacatggtgagcagctctcagcacccttggccctgactttccttccgcttctgtttgttgagcacctattgttcaaaatgcctgttatctaagaggctacagtttcctgagcgcttactatgtgccaagtacctcacacgtattacctcatttaatgcttactaaaaccctatgaggaagggaccattctcacccccattttccaaatgagacaactgagggtgagtaagatctggcttgagtcaaacagcaaataagacttggggtcagcaatgagccctcatggtctaacttcagaaccgttactctataaccccaacaaccatcctccaacacagcaaacggtattatgtccactttagctcatgagcagactgggctcagagaggttaggcaatttacccaaagctgcacagctacaagtcacagaaacagaaacccttctggctccagagcccaaaccctttctcctaagctgtactccctctctgggcttactgagactgcattttattttgaagccacattccccagccaatgcctggcaggcacggtgagtaggactggatatggaatgtgaaaacatctttacaggagaaagatttggctaaaccttaacattttcagacattttaattgcttctttggaacgcagatgtttttgggggtgctgcagccatggcccaagtagcctctgaaagatttgggtgtcaccagcaaatgagagtccctgcctgcttgctgatctcactggttgagcagcactagttccagatggttagagaactttggtgctggcttgccattcttacttatttcagtgaggccctcaaatgtgtagggagtgtgtcctaccaagtatccccctccacctgggtgtgggcagcaaacaccaaggtccccgcatatgctcgacacatcgtgtgggatacattgcctcttttgctctctccaggggcagagaaagtcacctgatttcagtggacaggaaagggacatgtttataatcagtagagggtgagggggccactctctgatctataagctcaaggtctctaaatgattaactctggtaccagcttggggaactgctgaacaccaaagacaaatgctggaccacatgactcaatggccctaaattcatcaaacagaggcacactatcggggtggtcatgacctagaagtaggtgatgtggttatcaactagcagcagacttcaaattccccactgcctcagtttcccttgttacacactagaagtttgtctctagtgctcgggcagtgggcatgatgttttatttgattgggcatacttttgcaaagattgctaagttgaacaattgctatctttgtttacattggattgatgttgaataacgggttatttaaagattttcatgagacttgaggcttcatttcagtacttccttgctcgataagtgtttgttaaatacctcctgtgtagcagacagtgtcttggcactttagtcaaaatatagataaatgacacttacttcctgaccctgaggagcttgcaatttaacaaaggacaggaaaaaaatatatatatacatacacacatatgcatttatatgtgtacatggccacatataaacatacataatatatataagtatatacaaatacatgcacacccatacatacatgcctgtgtgtatatatatatgtgtgtgttgacagatacaaaacccgagcgtgtgcatgtgatagttaacacaccatctctgtggtgttgaggacacagaggcatccagcagtgagcctgacagggaatgatggctgggtctggcagagggagaggaaatggttctgcagaccaggcagtatcccagtagcctcagagcctggccttgccctgggctgactgggtgagaaaggaggaaactctatccattgaagaaatgacatctctgtttggggaagggtggtaggcattttggatgagcctaaggcagcaggagtaggtgataaaatgaaacaaattaagacagttctagagagtgctctgaatgccaggctagggtgcgggcacatattggggagcgtagaggcgggacaagatggagtaaggagtaaggatgacattggtggtggggaactggaaatatagcccagtaggacaaatatttccatttctggaaaataactaccagagtttagacactcgccttcctgttggcactgggctctttcactttaagaaattcctatatatatgaaaatccaaacttataaaataaatctggagcctgatatttgtgtgacaaaagaattcttcccttcaggaagaaatattttgaaagctgagctcacacagtgctttcaaacataactcaatcaccctgcttgtgttaggagccccgagttgcggaaggcaggtggcctgcctggggcacactatccctcactaagcagaagtgttcatgggtcctccttttttttttctctgatggaggaagaagaaagagcacagattaatgagcaaacccagaagacagttctttctgttaacctggtgctgtctttcttattggagtttcctcctctgttttcctgcactcgttatattctccacacacacacccaggtatagattcatttttataaagaaaaaaaaaatcatcctgtcactgcctttttggaatcgacatgaagtgtgtgcccttcctttctgccaggtctaaacacctccatgccactggtgtgtttttgaattctttgttctaacaaaccagttccttatttcggagaggattataattgacagtaaatactttctttaactttctctaattacaatttgatttcaaatgtagttcatatgttttctatatagaaataacccaagcggtggggtgccaggtttttcctaagttgggaatgagcagagctattaaattaaatcacgagaaacaaggaaaaggtataattagtttctccaagaggatgccattgcacatttcctaaaagacatgaagatgtgtatgactggggatttcatgcctcataatatatatttttcttctggttttgtattctagtatggatttatcaacacctgtctgcaatctcttgtgatagagaaatttggtgaagaaacatgggaaaaattgaagtaagtatgtgaaagggaagatgaagtatctctggagcaactggtaagcctccagtgttttaaaggttacagctttttactgaccttttgattaagccagttagttgaatgaacccatcataaaagatacagctggttctcaaagagattcatttactagggagaccaattcccgtaccgtaaacatatgaattagatacaggaaacacctggtacaccttatctgtcttcgatgaaggtatcagtcttgattaccaaaatcagccttaaatgggatctcactgtaaataataccaacattattttaacttttatctcatgaatgaattctcattttctctttctaatcacagaagagagagcaactgcattatttccattgcacatcaagggagctgccaaacagaagaggggagataccttttaagtttgaccagaatcacttcttaggtgttctttggttaattcttagtttttctcctctgcctctgtccagtaaccccttaatgtcatcatttatatctccatatagtctcctgtctgactcttgcaatcttgtgctatctgtctgcttccctagaggctcccagacctaaagtgttagaagctggggatgaaagtgcctcagaaatcacttgatcctaggaagggagaggaaaacaaaaatatggaaaaatgattggcttcctcagttcatcaatgccatgcaaattaaaacaattaggcactgctttgcctattaaatctccaaaaaatttaaatgataataaccagttctggttaagatgcagcaaaatgggtaatcgctgatggcatagtaaatcagtgcagcccctttggaaagcaatctgacaacatgtaccaaaagctgtgcaaatgatcaaatcctttgaagcagtaagtccattcccgagaatctattctcttagaaatgcacacctttgtgcacacatatatgcatatatatgcaaaaagatataatgtagctttatattgataaataataaaataaaaattgtctttagtagttaaaaacaaaccaacaaacacatagaatgacaaaagaaatatgcatcatgatatagtgattgcaaagatcatgaagcaacttgcaaatttttatgacaatactgttaaaaaaaataagaaaaaaaccaaaaaagacacaagttacatatctactaggtaaattacacaaatgaaaaagggttaagagaaagaccaaaataataactaatagtgactgaattagataaaatgctggatgattttttttcctaacatctatttcccaaatttgctatgtttttattgcttttgtaatgtaaaaacaacttaaaatgcttaatgcaaactttccctcctcttcctcctacccccattttaaaaataaaataaatcgagctgagagcacagtgacttgccacaggtaggtcctgcccagacccatggccctgcacaggcctggtcactgcagcccactgctcacacacaggacaccatcaaccatcttattctcgggaaggcagcccaggggtaaatcagcatctctggggtaaattgcttacagctccacaagtttagatgggaaaaaggagctctggcctcatagaggcgaagaatattcatttccaaatattttaagtaggagcactgagtaactatgatcagggaaaccttggactcgtggacccttgagagattatttagcccagatcttcacagttgacaggtgaggaaactgaggcctagaaaggttaagtgacttggccaagactgcacagcaagggagcaacagggccaggatgcgctgtcagaaccttaaagtgctccttttcagccccctatgcggccgtgggaagagaagcatctgaagactttttcatttttttattttttgtaacagccattgcgttgtaaaggctaaactcagtaagaatagaggacaggaaagagcagtcttcttattttaagcacttactttcggccatgcctcttatataatggtcttttgaaagcccaacaagaacactgcaaggcaaggtattgccctgcttcaccaaagaggaaacagtcccggagaggatgatgctgaagactgcacagtgcataagggggctggggtggggacacaaatccaggtcggtaactgcaaagactcctttctattaggccattctacctggggaaaggaagagcaactggcaacgggaattcattttcttttttttttttcttttttggtgagacggagtctcactctgtcacccaggctggagtgcagtagcgtgatctcggctcactgcaacctccgcctcccaggttcaaatgattgttctgcctcagcctccccagcagctgggactataggcacccgccaccacgtgggaattcattttcaggggctctgggtgaaataagagaggtgtgtctttaaacatgtgtttactgagctcccatagtaggcctggtactatgaaaaacactggaggattgaagaagcaaataagccttttggcctggatggctttagaatctgtggaaacattacaggtatgcctggaacacaggaactagggtgctgaagggccatgtcagatgggaaactgggatcgtttcctctgctacaaacttgacaggggcaggtcagctccagccatgcacacctgggccttccagaggatcagctgctcctatgcagagggcaaggcgtcttaggaggaggaaggagagatggcaggctcagccaagctgttgggtggacactgcatggtggggtggggaaccaacttgggaaataggatactcatattctcagaaacacggcattgttgcaagtccttaggaagcagtcgttggattcagcgggggctctggggctacaatgctgaactcaaagcccagaagcaaggcctacagtctgtatgaccctggcatggcacttaaccactctgcgactcaggtatttcatctgaaaagaaaaataataaaagcagctaacctcatggggttattgcaagtgttaactgagattgatgatacaaaccaggcacttagaaaaaatgagtggcccaggatgagcactcaacaaatgcaagctgctgttgcataatggctgcttcagtgcttggtattggcttattttcaagatgctcgtcctcacgtgggttgggggagaggtggggggcagtggcgtgcgtcccactggactggatttgcatctgggctctgctgctcagagctgtgtgatcttgagcgggttgcttcacctctctgaagctctgtttcctcattgataaagggggaataatgtacctatcttctagggttaaggagagaattgagtggtgcaatctacacagaagtgcctagtagaaactcagtaagcatccttcctcctctctgagatataggtgctacattaagattacattatacttgacattattagaaccactttgctgctggtcagataatgatgctttccatcttgaagaagcagatattcctcaaaggctttctctttgcccagaggagaccttgcctcctaaagttagtgtgatttgctgaatggctttatctccactcctcatttcagtctgatctccctgacgcctagtgtgggccactgtctagccctgccttgaggaaccctcataaatgctagggaccaggccgtgaaggggagagatggatttttgttgattgatttttgacttacgaattttctaccatgtgatttcctggttaggacatttagcctcagctcagctgctgcttagaagaacctgtcctgcctaggagaaaggccagggctctggaaatcattgaaaatagccagaaatagccagagcacttagacatgagcagaggtaaaatgacatgttcagctctgcctacgacaggcagctgagatgtgttgtttaaggagggactctcaccctccgggtatgactgaacacagatagcatggccagctgctggaaccttcattggttgagatattcagcatatctttccaaatcaagggggaaaaaatctccagctttccatgtgtaagtggatggaagagactttttcctttttggatccttggtgcgacctctctgaaaggctggaatgtcatctctttcttcctttagaagagcagttctcatagcattcccaaacaaacaggaatccacatgacctccagggggataaaggacatttgaatgagggtacaagaatgcaagggaaccagagaaatatgtctgggaatagagaacccagcagggtacatcctgcgcttgtgtcattaggttttatctctttcatcttgaagtttcaattatctgcttaactgggtctcaggatgtttgtatacagagcactagacatctatacgattgcattggaaatgcatctttaagccaaaaataaagccaatctaagaagtccaccagctatgaaaattgcatcatattagaatttactaaaaagaaaaaagaaaaaaaaactagtgcagaaaactcagcttttaaaggagaaattaaggtgagattattggctgtgcaaaaggatttgcttaggccacatttaaataacaaattccctaatgcttttagagtagaatttcagctgagaaagaaaaaacccatcaattcctacagaaattttaagaagaaatgattaggtaaaatgaagcatgtttccagaccttatgacataaattttatcttaacatgaaataggaaacagatgtttctcctcctttgcttgcagtattttcctctcttatagtctagatttgtagatttctaattataaatcactctttttttttttttttttaagagacagggtctcactctgtcactcaggctggagtacagtggtacgatcatagctcactgcagtctcaaacccttgagcttaagtgatccttccacctcagccaccagagtagctgggactacaggaatgcaccaccatgtccagctaatttaaaaaaaaaatttttttttttagagacaaaatctctctatgttgcccagtctgtttgtgaactcctggcctcaagagatcctcctgcctcagcctcccaaagtgctgggattacaggtgtgaaccaccgtgcctggcctaaattgcttgtttataatcttttggttaaaacctttattgaaatttaacaatgagaaggaactaatggattaggaagagtaaggcctttggaatcagataaacctttacattttgcctggatcacttacttgctgtttgacttgggcaaatgtatttattcaacaagtatttagcttctagaatgtgctgaacaaagtttcaggcactgggaatagaggcaaaaggaataggcaagtgctgtgttccctgggaatgtattccaatggggaggacagtaaacaggcaaataaacaaataaatctcaggttgtgcaaagagctaaatttagagtatttagtggtgactgggcagagaagatgccagttgccctgagctggttagagaaaacctcttggcaaaggtaatgtttgaactgaaaggaaggaaggagtcagcctcaagacagagaagttatatgtgttccagagaaaatggcaagtgcaaaggtcctgaggtcagactgaactcagtgaagaaaaaaatctaacatgcttggaatatcatatgtgaggagtctgataggagatgaaggtggagagggttttagggatcaggacatataaatgtgtagaagatgagaaggagctgaacttttcttctaatgacaatgggttactgaagtttctgagctttggtgtggtcacttgtgaatggagataatcatggtgctcacctcatccacttgtgagcataggtgaggtggctaacatccccttggcactttgtttgcagaacttagtccaggattttacttccaaggatcagcaatccactatgtaagctaatgtttaaaggagttactataaagattcagaagactctaacagaactcaattgcaggaagtacagataaatctcagaggaaacagaaagtcagcaggtctgtttccaactctgcatctcccttcacgtttactctattttcctggttatctcttctctctgaaagtcttttgatttctgttccttttttttttttctgtcacccaggctggagtgcagtggcatgttcataggtcagtgcagcctcaaatcctgggctcaagtgatcctcctgcctcagcctcctgagtagctaggataagaggcacatggcactgtgcctggttatcttattttattttttggtgagacaggcttttgctttgttgcccaggctggtctcaaactcctgactttaagtgatcctcttgcctcagcctctcaaagtgctgggattacaggtatatgccaccatgattggacttaatttctgtttcttccaagcttttctatatgccctttggattcaagagatcaccatcatcagactggctcagtttctcagtgcctcaattgcagatgcctgagaaagagggtttgatggtctttggtctggagtccatatgtatcccattcagatggactttggagggtggggtctctaagaagaggtaatgggtagagccatcaggactgacgtatattctccattgtataaataaatacatgaaaacggaatgaatgattggatgattcatgtgtgtatgaatggaagatgaataaatgaatgagaggtggatggatgactaccaagcccaaccaacccatttaggagagaggtgggtgggattacatggcttctctctatgtcatgggttcttaaccaaaggttcatggataggcttgagaaggtctgagaaccctccgaagtcatctattaaaatgtcgtgtacatgtgactatatgtattttctggggagagggttcatagttttcatcagaatctctaagaactctacaatctaaaaaaaatcaaggaaccctgattatgaatccttgggatttttgttcttgctaaataggaaatgctggccgggcacagtggctcgcgcctgtaatcccagcactttgggaggccgaggcgggcagatcatgaggacaggagttcgagactggccgggccaacatagtgaaacccccgtctctactaaaaatataaaaaaattagccaggtgtggtccagcacctgtaacaccagctacttgggtggctgaggccagagaatcgcttgaacctgggaggcggaggttgcagtgagccgagatcgctccattgcactccagcctgggtgacagtgtgagactccatctcaaaaaaaaaaaaaaaaaaaaggctgttaacattgtgacatcctgagaagcattccttcgagcccagtatatcgcaaagctaattgagccagaaaaagtcagaattcattcattcccttttctgctatccctcgtccatccaattgactcaccaaatttctcaccctctcttcaagactgaaaacccctggccctccatgttatctacttttcccataaataaagtctagtttaaaagtagctgaaagcagagagtttttatttttaactttgatccaaaaatgttgcttgtctccccacttctgtccctttcctggccacaaacatttttgctggttcatctagctgcctgaaaccacagcccctcagagccagaagggcccttagaaatcaatctggtcagagcatttcacctggaggactcagcctccaaaagatcatatgagaatatctgtgggaaattctaaaaatatagtgaatattataatattaaatatacaaagcagaagtatttttttctaacaaaagctgtcaaaggtaaagcttgagaaatacttttgtttagtatgactatatggaagataaattttcttcttccttttttttttttttgagatggagtctcgctctgttgcccaggctgaaatgaagtgacgcgatcttggctcactgcaacctctgcctcccagggttcaagctattctcttgcctcagcctcctgagtagctgggattacaggcatactccaccacacctggctaattttcttacttttagtggagacaagttttcaccatgttggccaggctggtctcgaacccctgacctcaagtgatctgcccaccttggcctcccaaagtgctgggattactggcatgagccactgcgcagggcctggaagataaacttagtaggagtagaaacagatatcacgaggcctgaagcttatataatttgggaagcctcctttaaaaagaatataattaccaataaaaatttagctacaaaaataagtactcttcttagaattaaggaagaaaactttaaagctgacagataacataaacatcaaaagctggaaacatgtttttattgttagtatcataaattaactaaccctcttttataatactttcctgcatctttggctgtattttgctttttctgttcattggacaatgattttataatgtcattttctataaagaggatagaatgaatattctagcatggctggctgaaaattgtatttattgtattttgttttcattgttagcttagacaaatttctttatgcacatccataactttctcagcagtttcttgctgaagtgtgcttctttcatgttggcaagtcctgggaaaactccagcgtttgatctccctcgacctgttccacccatctcccctacttttacgcaagtcctcttggaccaggcggtccccactgggaatgcgcagcctctctttcagatgcctttttgggggttagagtagagtctggatgtgtgttgagtctaccagaagcaagtggtcctgaggactgggtggtctgcagccccacccacaggcatccaggaccactaccagggcatataaggtgacccctcaggctggggatggcttcaagctagagggggccaggtgaggctgcttcctccctgtcctggaaacctcagcttcattagcttccaaagcaaacctgaagcactcttgatttaaatcagaagttcttaaacactttggtattcagaagcctttatactctcataaattattgaagaccccacagagcttttgtttaatctatgggtatttatggtattagaaattaaaacaaattaaaaaaacatttttaaatttatctaaaataattatatgttatataattatgctgtaatacataatagtacatgttagtgtaacatttttatgataactatattattcaaataaattaatgacaagatggcattactttacagttctggaaatctcttttaatatctgacttaatggaagtaatggaagtgggattccatcttccgcaatgtatgtattctgtgatatgattttggttgaaacttgtgaagaaaatatggaaggaagaagaatttaatactcttctcagataattgtggctattcttttaaacctcacaaaagcttgacaaatcgtattttctcaaaggtcagttataatgttgaatctgtaactgtactgatgaccttcttcgtactctgttatattaaaatctcttgatctgtgttacacttggatagaaattttttcgcatcattttgtactagcttgcatgagttatttggaaactattagctcactgacttgtgctaatcttacaaatgttgacatgtttcactatacaatatcaaaattgcatttgtcaatatcatcatcaccttagcctctaaggattgggatgctaataagcttacagtataagatgcaacttttttccccaaacttgagttttgtcattggcaacacattctgccagttattttccttgaagtgacaggctaactttgttattttcttaagagaatgtgtgccaaatatccaagtctgagtaaccatagttcgtctgtcagtggttttttaagtggaaatgatgttccattaaaaaaagtggctaattcatctcataactcaatcgtgtaagtacttttcctggaagtgaccattcacactcctgcatataggagaagtactttatttgagtgcgtacttcccattctgttacacaaaatattcaaaagatgtatactcagggtcaagatttcataacattagtaatttttactacctcaaaatgaacaacctaaagtaaaactggcatttttttttactgcacatatgtgacaatgagggatatgatgactataaataatatactgaagatttaaaaaaagaatataatagttttgtgccactgtcttgattcatgctataaggcaccaaattttactcaccaatgcttatgtgccattagtgcaaatatgaatcagtacaaaaggcaaataatgtcttaatttggttttgaaaatagtttggcctcatggattcctaaaaacaccttaggtattcgcaggggttccatgggtcatactttgagaactgctggcttaaatgccttaagcatccttctaagtgaatcagaggtcaaggaaggagacatcattggtggctgagggagagaaggggaggaccagacatgacagtcttcatgacaatgacctagttgaatactatctttgtaaaaatgaagaaatggaggcacagtgagatttgctccaagtcatccagctagatggtggtagagccagggttaactcctaggtctcctcctgacacacagagtctgtgagcctctgtcaagttaggtctctcaccgaaattatcttacaattatttattgagtacttgttgtgtgccaggtacagggctaggtattgaagatattaaatcaaatgacattgtcatgatccttcaacttggtagtctaggaagcatgcagatgggcaaatcaattccactcgcagttagcacgaagacaggtgatacagagagcacggggggctcagagcagggacgcccggatctgcaagtggctgagaatgtccagaatcgggattctgacactgagttgggaaggaagaatcaagttagccagatcagggaaagtgagagcttttctagtggagcagagcctgtgggaaggcagggaagagaggagtttgagtagctggaggaatggatgtatgggataaatggctggaggtgaggagtgggtgcagaggctgggtcgtggaggctgggtatgtccacctaagaagtctagattttattaggaaagctgtggggagccagacaggctagctggaggacaggctagaaagacagtctggtgctttttctaaattccagatggttgtgacaccaggacaaatcttttgcctctctgggcctctctttccccaagtacaccttgagtcacacagtgacaggcaagtttgttatatgaattccccacctaccattaagagagctgttgaaaaaatgagttcctatggcttaaattgatcccattctcttggcctgaatcttgctacaaagtgctgttcatttttcctatgggctttatggctcaccctggactctgaataaccattacatcagtttagtaaggttgaaccacgtaaaatgtatcatttgtaacctgttgccttgccagactgaatcctaaaaagtgtttctgtgcagtggttttcaaacctggacagtcgtctgaggcgagtggttaaaaatatatggattttcagacactacctcctggggctcaggaatctgtgtatttattttgccctgtgagttgctctgctataggcagcctggccctgattttctgctcagatattttgggtatcgctagttggaactaactaaagaggaacatatattgaatgcctgctggtgccaattaaacactgattcctcagtctcctgcacatggatgcatacaagcacctatgtggctgacacttttcatgttccatgacaggtactcctctttgtgtgagctggaaacatctaactcttacttcatttcccacatttcttgcatctccaactcgatctcttcaaaatgctttccaatagtcatttttctctctttctcctctgcatatgagaggctctgtcatctcattggaagatatcaattggtttatttatttaaaaaaaattcttggtgaacatactgttttactaaagcagcttgaatgactacatatgcaagtgtgcactggctctgtgggaaatgttatatgcaggatcgtggagatcaataaacaaggctgaaaatccctgtataatcataacagtctgggcacgtctggcatcccagcaacgtgcaacatatatacaaacccaaataaatatttgacactaaaatatgatcagttcagcctacaggaaagaacaggctgccagatccagagattggtgaatgggtggtcccatcagagggccagggagcgccacagagtttgttacatttctgacggtcctggaggtcacttaaccctttctaaggtcttcagaacacattatgacaatgtgtcaagtttaaactggggtcacgtccacgtgtttctgttttgcttataggtgcagaaggagggcacatgttttcacagagacttgtgggcccctgggggcgagtaagaggcaactccaacatggtggagagtgccccacttaggcagcagtggtggtgtacagcactcctcgcccgagcaggcctacagccggtttctctgaacagctgcctccgaagatgcttagaaagcactgtataggcatgggccaaaacaggaactcttacaggtgaaggagaattcaagcagcttctagtcctagaagctagagtcctagatcctcaactgcgtgcacaagcgtttctggggctgtctgagaatccccagtggatgtgtgtgtagcagagaggttaaaaaagatggagaaacacaaatcttgcccagtacctcctctattttacggataaagaaatcaaggcccagagggggaaagtggttttccctcagagcttatttgtgtaaggtataagcttggaaccaaagtctcctaaaccccagccctggtcacctcctactcactacgcagcccctttgttctcattgtcatcacagctctcctaggatctgcatggtggttctcattttccccaagctctttcagatttgttatcctgttttatccttaccaacactcctggcagataggaagggcaggtaataataattgccacattttacagagaggaagatgaagtccagaaagatgataaagagatagttaaatttagtgatgaataaggatcctcaaacattagaaggttaggtatccagaggagggaccagcccagtctgcattttcctaaagggtagaactaaggccagtgagtaaattcccagcagcacagtacaggagtggtgtgggctttgaagttcagagcccagatccttctcttgtcaaccggtgaccatagcaagacatttaatccctctgagcatcagccttctcaacagtacgaggaatgataagtaataaattggtcatctcttgggccaaaagcacatgcttaataaataggaggtattatgagggcccagaagggggtttcatttgaacataagaaagacgtttccatcaaagagagcagttggtaagtggaatgtgctgccttgcaaaggaatgagcttgttgtcactggaagcattcaagaagaaactggaaaaccagcagtcagaaatagcgtgcagtaagaaattggacatttagaaaattggatatgtagaaaattccatacttctcgcagtgtcaagattctatggtgtgctctggataagcttgaatgctctgacccctctctgttcttcaaacatgttctctgctgcctagaagcctgttctctctgtccagaaggctcttctttgcctttccatccttcagtctcagcaaaatctccctttcttagagaagcattccctgaccaacctccttcccccatttgttaactcagttgccaactacagtttgatgactcacataagggccaagccaagggtgcaagtctcagactcccaggctaagcctcttttcagcaggcttggctatctgttgaagactaaagtccatccataactcctgcaacatagccaactacactgcaaaacagtgagaaactcaagcagctgctctaccattcagagaacaagactctatgaccattgagttccagtttactaccatatattaagttctgaacatgtgctcagtacagtgccacttgctgggggttcaaagataaaaacaggtcacaatgctcatcctcaaggagaccagctagtgggtaagaccaacaatctttatataagttgaggaaatgcatagcctatcctgggtacttgagaaggggtctccgggctcaaactgaggtccagggaaggcttcttggaggagttgacacccaaacactccagtgtctcacattccttatgatcaagaagattattgttacattatatcttgctgggtcagtggatatattcctggggcaaagctccagctgatgagcattcactgcacctcgatttatcctccagaacttctgcagaagtacaagatgccttcatgacctacacaatgtatgatgacgtcatcaccattaagctcatccaagaggcctgcaacattctgggtaagtatgaaagaacttgttttgctttcttagagctgctgtaacaaaacccagttgattctcattatttgcattggttatagtctataaagctgctgcaatcctgaattagtgaatactgcaccattgttcctaggggaaatacagggttagtttcctgaaagtctctggtcacaagatttttgccaaccaatcaatgcataactttgtttcatgtgtgcttctgtgaaaaaaatacgtatttaatatacatagttgattcattcacattgaactgctggccaactgtactgtaactcatgcctgaaggaggctaatctaacactgcctgttctctggaaggatgtgacagtcttcttgtgcttagggacactagatggcacttcagcctacatttgggggtcattctaaacagcaaaatcaccaacagaaaagcagaaaaatgtgaaaaagatgacactaaatagactgcaagaaggacacttggttatagttcaaactaaaataagaacatagagcacagccttgttctaccttggctagaagcattcatgttggccggtggaaattctgtgtctgtgaatgaccttgatagctctgtgagtattgatttcgggcctacagataaataagtagccaaatttgtgaatatgaaatcctcaaataatgaggaccgactgtatcacaacctgggtggcttaaaactacagaaattcgttctctgtggttcaggggaccagaagtccaaaatcaggttgctggcagggccgtgctctctctgaaggctctcaggaaaaattctttccctcttccaacttcgggtggccccaggctttccttggctagtggcggcataactccagcctctgcttctgtcttcacgtggctgtcttctccctgtatttgtgtctctgtgtctaaatttccatcttctcattaggacatcaagcatattggatttagggtccatcctaaatgacatcattttaacttgattacccaatttccaaacaatgtcacattcacaagttcctggtagacatgaattttaaggggcactctaacccagtacagggctcaggtatgaccctttccatttgagtggccttaggcttcttacagacaaaaatgatgagcagcaccgtctgcaccactgccatcatgtttggcttcgatgttggctttacaggtgttgcaatacctttagaatggtctgctatgattatctctgggtgtcaggaggaacaacattgagaatccgcctatgccacctacactcgtgcttacctggaaatggacgtggggtgctctgcagtgtgctgagggcccttccccgatctgctctccatcgcatattttcccatctgcctggacatgaaaatgccattgacagggtcataggagggggaccatgtgtggatggtcccactgacaatgtacgtgtcctcccaggatggtttttcctgtggatgtattagcactggattttttttatcttgttaatctgctcactccccaggcccagaggggacaaggtacaggacaaaaaaaaaaaaaaaaaaacaagaaaaaaaaaaaagaaattagctctgcctctttctagtttaatgaccgaggacaaatgacctaaatagtcacagttttctcattggttgaacaagatctaatcttcagagttatttggaggattaaatgagaaaatatatgtgaaaatatcatatgtggtatctggcatataataggctttcaaaaaacattccctccctcccttcttccctcattccctcctttccctcactccctccctccctccttcccttcctttcttctttcttccttccctcccctttgtgtttcctgggctgctgtaacaaagtaccaacaaccaggtggcttcaaacaacaaacatcaattctctcccagttctggaggccagaagtctaaagccaaggtgttggctgggttcattcccctggaagctctagggataacttgtctcttgcttctctcccaacttctggcagttgctggcaccgcttagcctgtagacacatctccccaatctctgtccccatctccacaggccttcttccctgtgtgttcacgtggccttctcatattgacagcagcctttggatttagggcccaccctaatcccttatgtcctcaccttattttaactagctacatctgctctcttttcaaataaggtcacagtctgaggttctgggtggacatgaatttgggggcacactattcaacccaatacaccctcgctttctttatccttccttctcaccagcactgagtacacaatgagccagggcaggcctgaggggagggaggggcaggcagcctccaccgtcccaggctccagggatctatgcaggaagccgaagcccccctctgtacccaggatctttgatgaggttcctctttcccttcccgttgaacttccttcacccattcctcataggcggtgctgccttgggtcactgtgagagtgtgagatggcatttaaggatgatctcactcagacgctgcatcaggcctcatgcttgtcacctggcaccgggtatagccctgttggaagtgtcaggctaggcccagtccctgggagtgtgcaagctggctcttatgcagcctgcagagggtctggcagcaggggccatggttttgagttggtttcatggtgcctctgagggcctagcaaattggcttgccattctcaggaacaatttgtgaaatgatataggtttaagccagtagcaggtatcacagtcatcagcccagcaggcgtgcctgagaacacaccagggcagctagctaatgctaagcccgcagggacaggcagcttctccagagcgcagcagtgatgtgtaaagtgcccgtgtcgtgtgaggtattgagcttatttcccttccctttggatttcagaaaaattatctgatgattaaaaagatagtgccagctttacttgcaggcaactggatctgacagatgagagggcttttcccatggctttcacatggcgctgtgactgatatctacatctcttctcatgttcctggtcatctcctggatgcagaagaccttccagggatccatatccaggagaggcccaaagtctctgccaagctgggagggggaagtcattgaggctgaggaagctggatgtgtgtggtgctcagagtcctctctggtaacaggtggtcacctgcttcccctgcccactctgggccacctgcttcccctgtccactctgggccacctgctgtctcatctcatcatgttgctctcttggagccacagagacaagcaggggccagagttgccaacgaggcctggcaggtgatggtgatcatagctaggaggaatctggtgtcccaactggttgttaaaacaacttccaaccagatgtatgttagcccctggtcacttcccacctgcatcttttgatagaaccaaggttgtgtctgaggctggaaataaggcacaaggagtgaaacagtcatttgctccttcagctcctggaactcaggcgccaagagcagcaacacctcccggatgcttcctaaagccagttcccagcctgccaccacggcagcacttagagggaggacacaggcagctggcagacagggctcacgtggcttcccaagaatcacggctgggcctctccccgaatccaccaaccagctccgctctccaaagaagcttacagagagagattctaggccaaagctggcccaggaactgggaagtgtcagtgatacctgcaaacctcacccctatcctgtccagcctgtcttggggggactcccaggcccttttgtctctccagcagctaacaccaggggaggtttctgtggggctgggttatcaaaaagcacacagcatcgagctttctgcgctcgagtctgagagcgggatgtgtcctctttacagcactgtgctgctcccaggggctgcaggcctggagacctgggttctcgactcagctctgctccccagctatggcctttttgttcaacaggtggcagcagcacagccaccccagagggtcacctgtcagcctttatgcttgacacacctgccaaagagattacctgttttgttttcttaagcatcactttaattttttttaaaagtatgcgattacgatgttaaatatgcttttgcaaaccagacagacagatcccctcttgatcctaatatgtccaccccacataggcaaagcctaggtgctgcccttgtggctgacaattctgcacatctgtgatcctagtgagggcaggaggtccacgagcaagtccagtggtttgcaattacctcctttcttctagctaagtaagaggagcatctagtaaccttccttccacaggaagaatacaaatcattaggtggaaattctgtaatgagagatgactacttttgagctgaaaatctggagttttgacagagcttaggaaataaaacggcaaaaaagcttacaatgggtagtgaaattaagcccacctttagtcttttcttgattttattccaagggatcccagcagcagaaggacgtagtggctgtatcgtgtagtcttgatttggtctgagccctctgcgaaagaacatctcgttgttattccagaatgagaatggagggtggattcttttccgtcacaccagctgtgtgaccttgggctagaatttcactgagagttgatctcctgcaaaaggaataataccttacagggttgtgggaaggaatgaattaaatcaaataacaaatgtaaggcacttagcaacatgcatggcacatactgggtgtttggtaaatgtcagccaaatgttgaatctgaaggaaggatgggggtatttctatgttttgtacctctagatactgtcccttataagaagacaggctttgctgttcacttcaaatggctgtggtaaaaaattatgttccacatgtacacagggaggggaacaacacacactggggcctgttgtgggggtcggggggaaggagagcattaggaaaattagctcacgcgtgctgggcttaatacctaggtgatgggttgatctgtgcagcaaagcaccatgacacacatttatgtatgtaacaaacctgcacatcctgcacatgtaccttggaacttaaaaataataaaataaaataaaataaattatgggccaggtgcggtggctcacgcctgtaatcccagcactttgggagactgaggtgggtggatcacttgaggtcaggagttcaaaaccagcctgggcaacatggtaaaaccccatctctactaaaaatgcaaaaaaaaaaaaaaaaaaaaaaaaaaaaaaattagccaggcgtggtggcctgcccctgtaatcccagctatttaggaggcttaggcaggagaatcacttgaacctgggaggcggaggctgcagtgagccaagatcgtgccactgcactccagcctgggcaacagagcaaggctctgtctcaaaaaaaaaaaaattatgttctgagctctctgattagtggtcagcaaactacatacagcttatgggccagatctgggcccttgcctgtttgtgtaagtcacgttttattggaacacagccgtgcccctttgtttatacatcgtccatggctgcttttgtgttacagtggcagggctgagtagctgcgcagagaccatatgacctacaaagccgaaaacatttattatttactatctgcccttcacaggaaaagttggtcatttcatgctctcaagggtggatgcagatctttttcaagattctaaaaatatcttttaacctaagaactgctctggactgaattgtgcccccatgccccaaattcatatttggaaatggggcctttgggaaataattaggttgagatgaactcatgagggtggggccctcttgataggattggagctcttataggagagataccagagcactggctctctcactccctgtcacatgggaacatggtgagagggtgaccctctataagtcaagtaatcatgttatcaccttgatctcagacttccgacctccagaactctgagaaaataaatatctgttgtttaagccaccccatctatggcattttgtcgtggtggccctagtggactaatataagaacttgaatcagcttgtatatctccagaaagaaatactctgtatatatcatatcaccccagtccatttttgtggctgtctgtgctcatgtacatcaaacggtgtggcagtacctccagcagtgagatgccatcacatacctgccccactgccgtcacattcccaacccaaccaacatgtgtagaggcagcagccagtctacagaccaatgtgtgggctggcccacatcacctttccaccgaaagccaacgtacatcactgtggtttctctctgcctagctttgaatgtcaggaatcttttcttcttgtagtttatttccataacatctattggcctatatctatctgaaagagtaaatgagtatggtgaatgcatttttcaaacaagaagttgggatgcaaaatcgagtgaacacatgtatgagatgtggaatcaggacagccccaggaagcccgtcgtgattctgtatgtctccaactcccatgagtctgagagagcaagacccatccaaaggaaaggctacaggaaggacattttactgtctaacaaaatatactggtcagttgaaaatcctccctttgacaagggaaaaagtgtgcttagtcaccactagtgagggctttgctttccatgtgggcttcagaatgcaatttccctaccttgaagcaattgctgggacttttccagaccgctctgccactgcatagctctgtgctttccaattagcataattcaggaggggaccagatggcaggttgagcattgcataaggaattgttctgtatatgaataagtgcctacttagtgtgtaagtgggttattagtgatctgaagcgacaaaattcaaaacaacacacaacagccatttggcacagctgtgtccgtctagactttgcttgcgaagacacccacagtaaaatgtgtttcaacagttagctatcagcaaatgccagcaagcctctctgcactcacatctttaaaaataagaacaacacaaaattgacaacgtcttgaaatcaggcattataacgtttgctcttcactattctcctctgaggatgggacaagtaacccaggctgtgcaaccagccacgaatggagacttgaattcaggtctgctgattccaaggctgatgcttaatcccacagactggaggggaagtcgacaatgtctagagcaagggctttggaatcagacggacctgggtgagccccctggctacaccggctcctgataatgtaacctggggtaaatgttcccctggtaatgcagcaatgatacctgtgacgttttgctcaccttatttgatttcttctgtaggacaacaacccagggggtttcatctgtcctacagaagaaatcaaataaggtgagcaaaatgcctgacaccgagtgggtacacaacaaggtacctcgccctgtccctcacccctgcttgccaccagatagacccctggccccctgctgtggccctggtagggctgactactctgttccaaggtttgacgggaaccaggaggcttcttctctaccaggcttcagcggaattgcttcatccctgcagagcaccaccttcctgagctgccttaatcgacttccagtttattttttctctgtgcctgtataaacttacgactacttctgaaacccaaccctcctaatttagagtcttcttcctccttgcaaactacagcatggacatgggcagatgtttctttccttttcttagactactctttctcctactccaaaatatttccccataaactaactcatgcctgacattagtgatatcattggagaaaaagagtatgtgagattctggctcttttcaggtatctgaagagtaatcctttggataccaacgctttgggggaaaaattacccattttcaacggaaaactttgtcaaatgtagagcatgtacttctctttcctgttgaagagcacatgttttgctgggtgactcaggaagagtgccatgaggaatagctcttgttgcctgtgacttgggtgacgggaggtgggcaggggtcttgcaagtctggccctgagtgggctgtttgtccaggaggctctgctttggtggctatggtgtccctgccagcctcactggggcttcaacaggcgctctctgtcccccagccctggacagcccaactctactctttccagtaccttgagctgaaacccagcaagaagcaaatgtttcccagtgacaaagaagacccatgcttgttaagtcagaaagtttgagttcatgcaacactccaatgtaaaagcttgttagaggtctccacacctggggaatcaagcatagaagctttgtgaccatcattttcctcctggaaaaaaagtcttgggtgggtgttgtaatcccagcactttgggaggtcaaggtgggtggatcacttgagcccaggagtttaagaccagcctggacaacatggcaaaacccccatctctacaaaaaatacaaaaattaaccaggcgtgatggcacacacctgtagtcccagctacttaggaggctgaggcaggaggatcacctgagcctggggaggttgaagctgcgtgagccgtgatagcaccactgcactccagcctgggcaacagagtgagaccctgtctcaaaaaaccgaacaaacaaacaaaaaaacaaacgaaaaaaacccaaccaaacaaaaaaaaaaacaaccaaccaaaaaaaactcaactcctttatttatttaaaaaaaatgttttaatacatacgcaaaagtagagagaattgtgtacagaagcccacataccctccacccagcttcactaattaacaatattttgccagtcttatttcatctatctgattcctccactctttttctagttttattttttctggagtgttttaaagcaattaccaggtttctcacaatttcatccataaatatttcagtattagtctctaacaagataaagacattaaaaatgtactgataatgccctgattataactaacaaaattcataacattacagaggcctgggctgcagctgtatttcagctggccatggataaacatggtctttacggtcttattatgtaagattccctatggtcttttcagagcaatcaacagaatcttttttactttgacataatttcaaacttgcaaaaggcttacaagaatagtacaaagaattcccatgtagtatttatccatattccccaaatgttgacattttaccatatagtgtctatccttctctttatatctagatttatactttttttcttgaaattgttagtatattgcaaatgtgatgccttcttgtccttaaaaattctcttaaataactacagtacaacaatcaaactcaggaaatgaacatagatatagtgctattatctaatctatagaccttattgagagttttccagttgacccagtgatgtcctttagaacaaaagaaaatcctgaatcatgtcacttatcgtgtctcttcagtattctttggcttggaacagtttctgagtctctttatgttttataaaattggtatttttggaaagttctggtcagacattttgcaaaatgtccctcaattgaggattatctgatattcctcatgatataattcaggttatgctttcctggcaggaagatcacagacgtgatctttttccttcccagtttatcatatcaggaggcatattccattcattgatctgtcctattattagtgaggctaactttgatcacttgatttacgtagaatttgccagctttctccactgtaaagttacattttccctttgtaattagtaccttgtgaggagatactttcagattatgcaaatatcttgtcatttctcaaactccctctttcatagttttagtatttatttgtgattcttgtctgaattgatacttatgatggaagtcaaatggtgattttctaagaatattattccttttgtatttattcattgagtttctgtaaggaagaatttccccctctcccccatgtatttatttacttatatcaatgtagatttgtgattcttattttttaaaaacaggctgtaatcctttccttttattatttattttgatgctcaaattgtgcaagagttagccagtgagagccaccctaaactggcccctgtgtccttttgacatgtccccatcattctttgatcacttctttaccttcttgcataacaagatgttataggctgatctcatcctttccctgccccagccctggaatctgccatttctccaaggccctgattccttttacaggagaagagcatttaaaaactaagatctagacattaggcaaccccactgctactgggatatcactgcttttaggccctcttagtggacagtgctggaaaatacatgtcatatacacacacacacacacacacacacacacacacatacacacacatacatccatctttctctctctatatatatatctatatatataatatatatctatatataatatatagatataatataatatatatagatataatctatatctatctatatatctatctatatatagatatagatatataaaatatagatatagatatataaaatatagatatagatatagatatataaaatatagatatagatatagatatataaaatatagatatatctaaaaccatgatagatttcattgtcttattatgttagattttctaatccagaggcacagggttcattctattcctcccctttccataattgtaacttcattctcagatagggaaaaacctggctcccactatccacaatatatttacttgttcagaacatagtttcagaattgctaacccacactgctgtgaaaaggaagcctactaactacagtaaaatatttgtttaaagttctttttgtttttggcctgaagacacagtagtgtaaatactatgttcaaatattactgggttaatttttttcctgggtgattatgttattcaaaactgttctgttgaaatgctgttctgtgaatttgtttctgtttgtactccatcttaggggttttctctatccttgttgatcttatattttatttattttaagcatatgaaacattaacatgactccccaaaccagaactgttcaaaaagttatgctcagaaaaatgtcattttccccaactccacaatttttctaatctttccaccccattccctaccaatgtcctgtaggtaaccaatctcaatagatccaggtttatccttctggtgtttaattttgcacaagtaggcagatagatgattatttccttgttttcccttctttcttacattaaagaatactaagcatagtataaagtctcccctgcactatcagaaaaacattttaaggcacctaagttagtttagttctttcttgcagtttctaaccatttcctgtatatcttggatcccctatgacttagcgggttcttggaatcttaaatacactgatgtgaaactgtataaaagactaaaacaggtgctgatttttttaaaaaagcggcctttattccctgctggacaagcattctcaactaagaattctagaagaagctccaaacccattacaggtggaaaacaccacactcaaacccaagatccttgtttgggaaacagttcatctctcagccagatgtcctttccttttaacagagctgggcatccacaaacaaaataaccagagcctggaacaaacagcttcatggattttttaagtttaaagatttgaaagtcaaacaggcagtcttttacccaaagctgccactcttacttgaatataactttgcttggcttacacgcagcccagtcctcctggcagaggttcttgggagaaggggggccgctgggacccctgcttttcctggcaggtaacaggatgcacctgctcagagctccagcctccaggatgcacagcacagctgttttttcttagtctgaataagctagatcagaggtaacagagggatggaagcaggagagcagaaggacaatttcccatctgtctgtttaccttttagcagtccccctcccagagactcaagcactggaaaggaacttggtagaatttgtctcagatcccctaggggttagcaggtggtccttgaatttataccagtgtatagacaagcctgcctgaggccggccaggatgcacccacaagcaaagaagccaacggaggcaattaacacaggccattaccactggcttctctaccatcccaagcttcgtctagattgagatccgactaatcaatttttggaaaatatgtataactcatcttggaaaatatgtacaactcatctctgacaaaactagaccaattcagtggggactctatcctgctcagattacagaacaattatctgccccatggtctggctgtggactatgagctgtagggaaactgctcttcagaccatcctaggaagcaagcaggggctggagagtgcccagacctccttcgtctgtcctctgtaggatttagccctggatagctcatgagacctggaatgtcccttgctgtgaattccaaatccagccagagcatcacagagtttttcaaggatgcaaccacagatactggtgatggtgagctcttcaggccttccataaacctgggcattacagacatttgccccagcccccaggacttacatgtgtcacagccccattgtaaataagagggtgtttctcacaggatctccagaccagcagcatggatggatgccctgtctcctgtgtcaatgatgccaacgcataagcagcgcttcccttggggagactccttgcttctctcattgctgcttcagaggctgggggatgtggtataaaaagtgctaaacttagagttggagcctcttcaacaaatctggcctctgcaactctatgtgactgcagtcaattcacaaagatgactcagccccaacaggctcagctgtaaaaaggacatgataataaggttagctaccttataagagctgggcaaacattgagtaacagaacagtaattaatgtgtgttgtcagaactataaaacattcttttaaaatgtttgctgtctttcccataaagtggacacttgcttactgtctattccaacagtgtagactggggagcggggaggtgggcagcagctccaactaatgccgcaaatctacctccaggtgttcatcaggcacctatgctgtgtttagcacagaaaacgtgtaggatcgggttgcttctctccagaattaccatgaattaggaagaaaaaaaaatgcaacacttaggaagagagaattcagagaaatctttatggagaatggaacaggaacactgggcctcacagggaggtcaggagagaaagggaaagacactgcaagtatttggtatcatctttttggtaaatcaggatcctgtagccttgaaggcatagttttttcattgtgtattagttatttctcagaggcatccttgtattcttgttagagactgactgttacatttaaagatgtgggaggtgttggcagtgttcgtggagggtcgcgccctccccacccagagtgaagcttgttctgggcactggcttcagcagctaagcgggtacagcatctctgcatccccttctcgactttgaggaagtatttgtcaaggagacttatgtttcacaagcacctactcagtgccaggctgcacggggctcctcccaagggcccatgacatcaatgtggttattggcattttaccgaggaggcaagtgacggcttagagagtagctcgatagtgtcacacagccaggatgtgaaccctttggaaataaatgaagaccacacaaaggacaacacacacctccaggagattttatttagggggtatgctttggtttctacaggtgtctccatggaagccatcctgaaactctttggagaatactttcaattctgaagatgtctggctatgacaggatgctacggacactgggaggaaatctcatggagtttattgaaaacctggatgccctccacagttacctggcactctcttatcaggtaaggccacttgagtctggtcttggctgcccaagaggaagcaaatgctgtggcagtcctgggccagctccccgcctcccccaacagaggcacggttgcaggagaaccctcccatctgcagaatccttggtacctggtgttggtgggctcaggagttctttttggaagagaatgaaaaagaaacacctgctggccacttttataaactggctcacaaaaaccgaagggatggccttttcagatagggtgtggtgttgatttggaattaaatcctggagactcattacaattggaacaaaggctggaaaacagtcaggtttcagtgcatttgcaaaagctctcctaaggtttcctggccaggatggagctgataaattgcatatgcagccagattcatgttattcatgtatcagaagggaagacttgacagggctaagagccagaatcggaaaccatccaactctgattaacccatgggtgactgactgaggtgttaggaaactaatttccctactgggatatatccttctggagttctttccttgggtttcttgtttgtagagatcactggaaattcaaatgcctagattctcttttattttttagacaagaaaaggtgaaagagcatttatacatatcataataatagtttattgctttagagaacatagtttaattttaaggccttatatatttcaccgagatcttccttcaccatttctatattggtgttcatatccaccctttcagggttgtcatggggacaaaatgggattgtggatgttaaaaagcctcagcaacccttacacccccccatagacgataaatgggaaaagtattattttctccatttttcatataaggaatcagaggcttggaagccttaactgacttcaattatgaatcatgaatagttgggcatgaatagctgggcctgtcctattgttatcatgtgaactactcaagggtagagggagtggaaacagccctgcttatggggtcagatgggcccatgagactgtcccactggctctaccacttaacagctgtgcgatcctggacaagttagttgccgtctctgaatctcaatttattttatttaataatatttattgggtaactaatatttattgagtgatactatgtatcaagtactttttaaggtattggacacaaacagagacaaaaaggaataaatagggaaaagataacttacctcatagcaatatgtggattacaagagataagatggaaaagtctagcattgcaatcagcccagaaaaatcagctttccataaataaataataactctattccttcccctttcttttctctctgttcaatatggccagtttaagaattaacgataatttgcatgacaacttcctttcaatttcttagctaaagcacaacaattaggatataaagaaatagagttaggcccttttaatatttttttataacacatatattttttatcctatgatctttttcctttgcttttttataatttcaattttttaaaaaagattcagagggtacatatgcaggttttttacatgggtctattgcatgatgctgaggtttggggtatgattgacgctaacacccaggtagtgagcatagtacccaatagtttttcaaccctcgaccctatcccttcctccctcctctagtagttcccggtgtctgttgttgccatctttatgtctatgtgtattcaatatttagctctcacttataagtgatgctagagaagcaatagaatagaacttatctggtggtatttgaggacattttgcacataatgaggtaaataaaatatttaaatattataatatacaagttggaagaaaatacatgcaatgatacctaacagctatatagtgctttattctgggcaaagtattatagattgtctctttaggcaaaaataacaaagtaagataatgttcactttttttgtgtctatctagtaatttggcagtgcctttaaggtatacatttctggttataactgagcctttaatcttgttatgctttggccaaacttcattgagtgctaattatgaggcaggtgttgggctaagtaatgtgtcaacattgacttaccttcttgatgccataagagtaggcagtcttatttttcctgttatacggatgagaaaactgaggtccagaaagttcaagtaactgtccccaaatcacccaggcatggtggctgagctggacccaaacccacacctgtctccaaagatcctgccctgtgctgttctcattattctttggaataataagaactttgtcaaagatcacgtggctttaggtgtacagccttatttctgggctttctattctgttctgtaatgatacctaacagctatatagtgctttattctgggcaaagtattatagattgtctctttaggcaaaagcattttttttattctgttattctttgccctaattctccacttttaaaaagccctatttgaagcaagaaataaaagtgtaattatattatttagagacttagtgacattgaccagaagaactaaaagcatgaacttttggaagtgtctctgggcagggggtaaggagtgaggggcatgaagcaggatcacgtggactttctttcaggcctctgtattctgttactttattttcactatgtaggatttggatataatttttaaattaactgttaatttcctattttatttatgctttttatatgtgctgcctcaactactctttacattttgtcaagatgtaaacacacatacatacagataaatatatgtactttctctaggtacatacttttggaattagaaaaaaatagtatttgagggctgggcgtggtggctcatgcctgtaatcttagcacttttggaagccgaggtggacaagatcatttatgcccgggagtttgagaccagcctgggcaacacagcaaagccacatttccacaaacaatacaaaaaaaaaaaagtagctgggcatggaggtggcgtgactgtaatcccagctactcagaagcctgaggtgggaagatcatttgagcctaggaggcagaggctgcagtgagccgttaccgtgccactgcattccagcctgggcaacagagcatgactctatctcaaaaaaataaaaataaataaaaaattaaaaaaaataaaaataaaaaagtatttggggaaaaaaaagaaacccattttaactaacaacatttcaccatggaagacgacaaagatcttggaaggaacccatctcctttacctattccctcacttggaccaaaagctgtgtgtccagggtgctgagttgccctctaactagctagagactcccctaggcaaaatctctatccttctttcctagtatacatctcatttactgtgaaatgataggtacttgaatgtcaacatttctggagaaaggggaggatctcttctgatgtatccttgaaggttctacttttttttttttttttgagatcgctctgtcgcccagtctggagtgcagtggcgccatctcggcttatggcaacatcggcctcctgggttcaagcgattctcctgcctcagcctcccaagtagctgggactacaggcatgtgccactatgcccggctaattttttcgtatttttagtagagacggggtttcaccgtgttagccaggatggtctctatcttctgacctcgtgatccgcccgcctcgcctcccagagtgctgggattacaggcacgagccaccacgcccggtggaaggttctactttctaaatgttcaaattgatatcacagaagacattatcctttcagaacaagacattgattaattctacttgcaaattctctgattccctgatgtgttggaaagtgaagatgcccatggtcacttggtcacaggccaagcgcggcggaaactcactaaggcttcctgttaccagcagacagctgcttttggaatatgggtagaaacagcatggcacggtgcaaaggctcatttgggaatcaaatgttgttctaccattaacctaggtttgccttccctgagcctcagtttcttcctcttcaaatggaactagtacttgccatatagagttgtttaaagtacagtaggtatagtataaaattcctgacatacaggagcagaaacagtgggagtttctatgtgattggagagagggttggcatatagctctgtatgatgtaatgggtaaatactattgtttcacaaagcgtcaaaagcataatttacacaatttgtgtccactgggaaaaatgtgtgtcttttaattaggagatgaatgcaccatcgtttcgtgtggagagaggagcagatgggaaaatgtttctccattactactcggatagaagtggtctgtgccacattgtaccaggtatggaaatggcttagctggccgcagagctatggggcttctgaagtgaggaaggtttccccatagattctccaggatggctaataactggctacgggtaagaagttaaaactcttagaatgtgtgacttcatatcatcttgaccactgctcccaatgtccttgagcttttaaaataagtttccaaaattccacaaaaatgagtaatttgtacttttctttcaacattttaaatcatacaggcttttacatagttgtgataattctgcgtatattattttgtatcagctttttatttgcatttagcattgtagaaaaagcatgtttccacataatctttaaaaccacatattaagtggccgaatgatattccatattgtaattatcttaactaatcccctattattaaattttccattgatactaatcgtttgcttttgtaaacagtgctatcatgaacatcttcatacatgctttccatttatatatttttttcttttttttttttgagatggagtctcgctctattgcccaggctgcagtacagtggcgcgatcttggctcactgcaagctctgcctcccgggttcatgccattctcctgcctcagcctcccaagtagctgggactacaggtgcccaccaccacaccttactaattttttgtatttttagtagagacagggtttcactgtgttagccaggatcgtctcgatctcctgaccttgtgatctgcctgcctcagcctcccaaagtgctgggattacaggcatgagccaccgtgcctggctctttccctatattttgtatataaccctgggatagattcccaggggaacacttttttgaacttgatccttaatgcttttacaactgaattttgcttacattatctctaggtttatttgtttgtttaatgagttaaatgcctacctgaaataacaaacaaatgaatagatgccaaactagaaattaaagtggcatggatatatttggtatccaaacatgtataacttcagtctctgcatatttttatttaattggctgtcactgatgtctgatttgaagcagggcctgggcttggtgaacttcagaatattcatcagaagttttgccatttgattattttatgatttttgctgataaagttgccttcggccatccctcgacaataggtgtccttctgctgcaggtatcattgaggctgtggccaaagacttctttgatattgatgtaatcatggacattcttgacatgaatgaagaagtggagaggacagggaagaaggagcatgttgtgtttctgattgtacagaaggctcacaggaagatgagaaagacaaagccaaaaaggttacaagacagtcagggcatggagagagaccaagaggtactgggtttgctgtgcctttagaaagaacagttgcacttaagtagagctacgagtcttggaaaaatctatgcaaacaacagaatcaactggacctttttgtttttgtttttgttttttacgttttcctttaagttctgggttacatgttttgaatgtgtaggtgtgttacataggtatgcatgtgtcatggtggtttgctgtacctatcaactaggttttaagccccacatgcattaggtatttgtcctaatgctctccctctccttgccccctgccccctgacaggccccggcgtgtgattctcctctccctgtgtccatgtgttctcactgttcacctcccacttacgagtgtctgcggctataccaccctgaacgtgactgatctcggaagttaagcagggttggtcctggttagtgcttggatgggagaccaactggaccttctaatagtggaattaaggcagagtttctcagttttggcactgctgacattttgaaccagataattctttggtgttgatggggtgtctttcacgtcatagtgtgcttagcagcagccctggtcttttcctactagtagaacctcatcccctcatttgtggccaaacaaaaaagaaagaaaaagaaatgtctcctggcattgccaagtgtctgcgtagtgggggtaatggataaaatcattcccagttgagaattgctgggttaaggttaagtggatatatactgggaagcattctgggatgcacctgagcctggacaatttttcacctataacaataaccatatgaaggatttgaaatttgaatttgatggcttttttttttcaatcctcctcaaataaattgatctttccagtcttcagtgcccacttctgcagctggaaccagtcataggtcctgagtcaactcaagactctgtacttggccaccccagttgcaactgatagggtgatcattacctgcttaagttaccatgtatgttagctgaacagctctccatgcacatagcttgtgaaaatacccagattaggattagtctctgattccttagagtattttcaaagtccatctcagagtctgttcactgcagaatcttcaaccacaggaagaaatgttcgtgcatgattttcttgccagatatcatcctagttccctcttgagattttctaaaaagttattgctttctttgatagagaaacagcatgaggactaatttgattaaaaaataccgggaacgctaaagtcttggtagaagtgatcttgtaagccctcatgctgttcctctggccatggatacagttccttatttaaaggtggaccccatcacagcaaatggggtttgtgcttctccagtcatgtgaccaggtacctgtctccctgccacctgcaggccctccaggcagctttcctcaagatgaaggagaaatatttgaatgtctctgcttgtcctgtgaaaaaatcccactgggatgttgtgagaagcatagtcatgtttggaaaaggtaagtgagtgattctcccaagctcagctctgagatcagaaagattgcttgattctcaggagtagtggccagtgtacactgacagggccaagccctctgtgattgtgttggcactagtttctgcaaagcttggatttggtgaccatggtttttaactttaaaatgtcaggctctaattgtccttccattgcctctcattatttgtgccgggtgacatggagacatcatctcccctgtcctaagaaaaagtttttggagacacaattggaatcactcccaacaggtgatgggtggagagaaggaagatgagcactgatgtgccatcaggaacaatgaattttccacagctcgtcttctgcagtcaggccttctccatttggacacatttctggactggagatctgtggataacaaccctagtcgcccaagcaaaggacactagatcaagagccaagaaagcaagtttctggctctgtgcctaaggagctgtgtgaccctggacaagagtctccatcttctcatttgcaaaatgcaggcattaggcttgctaaggtacccctgtgggcactgagcccgtctaacgattagcacctaacgcctgagtctgaataagggctctgatccattgggagaagggagttagggtgctctgcgtcacgactcaatgggccaggtgacacgcatctgggagaaggtctgcagggctcaaagggctgcattttgcgtccttcaagccatggcaagtgagtcaaacacgcaattgacatcctttgtctaggagattttcatatcaaaaaggctccatttcgaatctctaccccctgccaaataggactgttggttaaattttcacgtgccacccaaaactgtcagtctaaaaagctccatggcaaatgtccctgatgctgggcccggagcacacgctctgctctgctagctcattgtctggctgtcaccatttcaatgccgactctgtgttcatggcgagacatactcaattggcccagaaactcttcagcggcaggcagaaacttggcagggggcaggagggcttctcaacctggtagcaagttttctgtttgttttaatttggaagaagaattgctgtggccatctggagatgctgagggagtccatgcaaaagaagtgagattgcactttgcttgtgaaacacttaagatactatccctatcccgagctctgctctgtgcaagggtggaggcgggagctgcttctcatcagcacttcctttttctatgtccagggcatctcatgaacacctttgagccaatttatcctgagagactctggattgaagagaagacattctgcaacgcttttcctttccacattgtattcgatgaatcagtaagagactcttccctctgtagcttagaattggggctaagccagggaagtgagcatgatttacagtccttcatgaacagtggagattttcaagtccctgagaaattcccagggcttgggagactaggctttatcctggcaggaccattgatttgcttttcatattgtggtatcctccagaatccattatgcaggatcttcttgatagggtagaaagggaggtttgaactagtgaatgcatgggaaagtttaccattagaaaaaaggggaaaaggaagtgacactaaaattcactacataaagagacagcagaacacagtcagtagcaacaatagggtggaattctacccatgaactcttcccatccttgtgaccaccatgtatgtctccatcccacccagcttcacattctgcctcttgaacatggggaaggggtcatgccaactcaagccactgctctgtaagagttgtgagcataactatttaagtttgattgttaatccatttctatggataaaatatatgtcaactgaattgattaggaactcatttaaaggacacctattttacttcttccttctgtgtgttcactggagatagcagtgaaaggtattcccccacccccttgatggatttcttcacccaggcctgggtgatagatccaatgctatagaatttgctagtttcttcattagtaaatgatagagagagtgagagagagagttgtctcagagagcaaggaggaactattagcccaacagagagctgtaacctcatttctctttagtcggaaataagcctctgagcactctcgtattattcttttctctttcagacattagcacagatttgattgtttcaaaaaaatttattacttccatgatgttgattccattactgaccccctttcccgatagtgagccacagaacatggctagaatgttatttccaaggggaagtttatgggaagggaggttgctttctattcctcagcttatatctgtcctctgtggatagctacaggtgaagcaagccagagtgaacattcagaagtacgtaccaggactccaaacccagaatattcaactggatgagtatttctccatcattcatcctcaagttaccttcaacattttcagcatccgcagatttatcaacagtcaatttgtcctgaagacacgaagagaaatgatgcctgtagcatggcaaagtcggactacactcaaacttcaaggtaatcactcactcctttcctgttgctccccacctgtttgagagattgatccgaaagggaagaggcagttttccaatttcctaaaaagtagggtaggggctacgttgagaacacgttttcttttttctgacgtttccacttgacttgatctgtaaagaatatattttatttcctcaaccatctctggcttagacgtaaactatgtatgtaatatagttacatacataattatacaagtatatacattatgtaattataaaattctgatatgttaccaaaattttcagaatgcatgaggtgctattggtattaaattaatgtctgtattttatgtagcaacatgatcatctaactcactattagtagggcccacattttgtttttaattgtagtaaaatttacataacaaaatttaccattttaataatttttaaatgtacagttcattggtattaagcacattcacacgttgtatgttgtaccttcactaccatccatttccagaacttttttatattgtgcaaaactgaaactctgcctattaaacaataattcatttgtccttcctcaattccccagtaaccagcattctaccttctgttcctatgaatttgacaagtctagatacctcatataagtggaataatacagtacctgtccttttgtgactggcctatttcgattagcataatgtctttaaagttcatccatattgtagcatgtgtcagaatttcctgcctttttaaggctgaataatattccactgtatgaatatacaacattttctgtatccattcacccatcaatggacagttggatttcttccaccactttgctattgtgaataatactgctacaaatgtgggtgtacaaatctctttgagtccctgccatcatttatttggaatatatatccagaagtggcattgctggattatatggtaattctatttttaatttattaaaattaggaacttccatactgattttcatagtggctgctctatgttacattcccatcatggacatcaatggacaagtgttccaatttctccaccatcctcatgaacacttattatctgctttttaaaaaatagtagccatcttaatgggtgtgaagtggtatctcattgtggttttgatttgtatttctctaatgattagtgatattgagcatcttttcatgtggttaatggccatttctacttattcttcagaaaaatgtctattcaagtcttctgtccatttttaattgagttgtttgcttttgcagttgagttgtaggaatttcttgtacattctgaatattaacctcttatcagatatataatctgcaaatatattctgtatgttaccttttcactgttggttgtgtcctttcatgcacaaaagattttaattttgatgaaatccaatttatctattttcttttttgttgccagtgattttggtgccatatccaagaaattgttgccaaatctgatgttgtgaaacttttcttctatgttttcttttaagagtttatgttttagctcttacatttaggtctttgattccttttgagcaaatttttgcatatgccttgaaagggcacacattctgagctatctttctattagagggatgtttagttattccagggataagcacaggcagaactcgggggatgtccaaggggagaatgacatgttctgggaacccgagtgaggtgtagagtggagtgatgggagaggaggctggcaagatgaggacttgaactctatcatgcagctggaaacatgctgaagtgtctgccatgatcagatttgatgtttagaatgatcactctggaggtgtgtgaaggatgggtcacagtgtagagaaaatggatcctgggaggccagacagaggctgcttctggagtccaggaaagaaactctaaagtgctaaactctggcagtggcactggagtggcaattggaggatagactcacaagataattaaggcaggacttggtgactggatgtggggggtggaagagaatcgttaggataattattagcttccttgattgggtaactgggtgatgaaggtgcaattaactgaaaaaaagacataatgtaatgtccttgaggcagggatttttgccagtttgagtcactgctgtatcctcaatgcttaaaacagtgtgcctagctcatcgcagggactaactacatatgtaatgaaagaactaatagaaagagaagatttgtggaggggatcgaagttgagttcagtgcagatatccatgaacagatacctaatagggagaacagaagaaaaaaaaacactgttcctggaggtattaattgtcagaatcatcctagagtgtattttggcaatacgtatcaaaagccttaaaaatgaggatattctttgtctaagtaacccgtgtctaagaatatatctttttaacaaactaactagccatgattatacacaaagactgcctcaagcttattcatcacaatgttgtttatacaatgataagctagataaaatataatcaatactagcttattatttaataaaagacagtatgagcaaggtaaccagcaaaaattaagatgaatatctatatttaatactatgaaagaatatgttatatattttaagtgaaaaattcagattatgaaaagaagatgccatgtaatccctgtttttttgtaaaacaaagatatactacaaaatattaacagtaattatccatgtggtatgattatgggtgatttttactattttctttcactttttttgttttctgcaatgaatgtgtactgcttttacaataacataacaaacatatctatttttaaagaaatacacatattgagttcaggaagcaaggtttctctggaaattcagatgcagtcagcgtggtgtaggatgcagttgtgtgatgctaaatgagaataccaagacaaaaccctcaggaacactaacatttaaggaatgagattaaaataatgtaagtaaaaattcaaagaattaggggacatctcagagagaaagcagtgtcagagaagtcctaggaagtgagatttcgggaagaagggtctggttaacatcatcaaacagcagaaaggctgagtaaagaaaaggccaaggaacttgtgttggcatcggtagcatggaggccattgatagatgggagccacttcaatgtaggcaatggacacagctgctagggacagaggggagataagtaaggtctcacagaccttgggtaaaagagaaagagcgtgactgtgcagtaactagaagcacacagtgtgggagatgattggttgtccagcgagctcgtctcagtccctactggtgacatactctactgttgcatttctctccatgatggcaaggccagatgatctggatggagtccatgtggtgcatggtgtacctgtgctctccgaagctccgcagcctgcaagagctggaagaactcaatatgcatctttctgacatcgcccccaacgacaccaccagggatctcatcctcctgaaccagcagcggctggctgagatagagctgtccaaccagctggaaaggaagaaggaggagctacaggtcctctccaagcacttggccattgaaaagaagaaaacagagaccttactttatgccatgctgcccaaacacgtggccaaccagctgagggagggcaaaaaggtggctgcaggtaaggcaccctctcctccacagcgtcctctgagcagagcgtggtatgtcttagtggtcagggccacaggctttgaagccagacagaagtggttttgaattctggctctgtcacttgtaagtggcatgatcttggggtaattactccacctgcatattctcagctttgttctctctacattaataataataataataaaaataatacaggagtgaaacatgaattatataaaaatggttgtcaactacacacacattaaattctctaagaatttaaggatatgtcctgagactggcctcattactcagtgacaatgagtagggttcttaactttaactagaaataatacactcgcacactagttaaatcatagggttcctctgaggaccattctgggacagtatactatttatggaggcagggatgctgtgtttaccctgaactcactttccgtttgtcatgggattgtgttcattcaccagacacgcctggtgaacttactctgtgccagggtgctgttccagatctggggacacagaggagtttacagcctcatgagtttgatagatatatgcagaataaattaatgggggtggaaatgaccaaaggaaaagaaactaatttgcattaaggagcaattattgtgccaggatccatgttagacattttacatgtgcagtttcattaaattttctcaacatttctatgaaggaggtgttgtccataccatattgctgagcaaattgacattcagcgcagctgataaatgaaagaggtggaaactaactgcgttaaggccatctaactccaaaatccatactctttccatcacacaaggtgctatggcaacatggggacagggaaattaataataaatagatgtcaggagataagagataggggggtgggttggagttgtggaggtacctctcaaaagtgtgtgacacttgagttgggccttgaggctgaatttcagcaagcaaagaggaaaaaggcatttttggagaatgggctagtaagagtcaaagttaaggcaatgtgcaaacgaataccatggggcatgttcccagagcgtggggtatgtggaaaagtggggtctggtgacgctgagtgggtagggtggggttcaggtgatgcagtgatgaatttggactattagggaaaaggaaattgtcttttgtaggcagtgagaattcattgaagtttcttctcttattatggaagtgacaggatgagttttataaatccgattttggctgcagtgtaatgaatgcatgagggggtgctgaaagaccataagggcgcagctgattgatggtagaggcctgaattagggcagcctgaggaagaatcagcaggatttcctcactgaccagatggggaaggtaagacagcggaggcaggcatgggtctgaggcttctcgcatggaaaaatgggatgctttatcctaagacagggccagaaagaagagcagggttgggggagaatgataaggtccattttagaaccattgagctggagatgtctgtgggatactccacacagcatgatcagtggtaggaatcttagtgagagctcataggaacattgtggcatggagctatacatctgggagttattgcaatgtgggcggggttaatcatagactctgaatggtggataagatcacctagaggacaggaagtgagaagagagtggagtattactctttagggaacatctagtgcttaagaaggttgagaagccaaggaaagatataaaacaaggagatcagaaaggtaggaggaatatgaagagaggatgataggccagaagccaaggagaagggaaagttccacaaaggggaaattaccatcagaggcttaactaacaaagaaggcacccggctgcattcaaggagtcattgattcactcactcaatatttattgagcatttactatgtgccaggccctgctttaggtgcttgggatatggcagagatctaaactgacagtctcccgtctcatggagctttgtattccaatggggtggtagacaataaccaaataaaccattccatacaaaatatcaggccgggcatggtggcttacgcctgtaataccagcactttgggaggctgggtgggcagattgcctctgctcaggagttcgagaccagcctggacaacacggtgaaaccctgtctctactaaaactacaaaaaattagccaggcatggcggcgtgtgcctgtagtcccagctactcgggaggctgaggcaggagaaatgcttgaaccaaagaggtggaggttgcagtgagccgagatcatgccactgcactctagcctgggtgacagagtgagactctatctcaaaaaaaaaaaaaaaaaaaaatatatatatatatatgtatatacatataatgtcaaatgtatggagtgggtggaaggcaatcaagctaaaaggatagccagtctaggggctattttatacagggtggtcaggagagttctcactgagttggttacatttgaaatgtgagtaacaggccctgtagatatttgagaaaagtgtcaggcagaggaaacacctctttttttaagtgtagaagcctgaaggcaggaggcacttggcatgctggagaaaccccatgaggccagtgtggccagagtggagggagccggagggacatggggtcagagaggtggcagggacagaggtggggggtcccctctgtaagccatggtcaggactttgggttgcattctaagtgtgatggaagtcatgaaagatttgagattgaagaatgggagatctgacttaaacagggcatctggctgctatgtggaagttagcatgaatgggggccaaggtggaatcaggggcatgatttaggagcaagtgttcaggacaaggtaggtttcctgccattcaaagacagggacccatcacttcacagtgaccagtctctgtcagccctgtccccaggtctcctgtagctcaggctctgcttggcccacttgctaggggccctttctgtcctcccacagcactggtcacattttactggaaggatttgttcacttttatgtctccttcattagactgggggctccttgggggcgagggcctggtctgcttgccccctgtgatatgattctcctactacgactagcttgcagcgggcactcagtaaacgtgtgctgggtgatgctgaatggggaatggcatccagctacttttcccacaaggcacagggcaggtttgattctcacagggcctcttaatccagaattcatggacttattagtcgatctccttgtttctcactgatacctggtttctgttgtaggagaatttaaaagctgcacgattcttttcagcgatgtagtgacatttactaacatctgtactgcctgtgaacctatacaaatagtgaacgtgctgaattccatgtactccaagtttgacagattaaccagtgtgcacgcagtctataaagtaagtgtctgtgcagtgtggggtgtttcacggtgtgctcacgcagggcgagtgcttgattctaagtctccctttgcctctgtctgcactggtctggggtttggtgtggatgagtgtggggtcagaataaaagctgaaagggaattggaagtattttaggaattctagtttttagaaattctttttacaatgctcagtgctaagatggcactctggtgcccttgaggggcacctagatgtcaggtgttttcatagagtgtagttctcctactcctaaattcagcagaaaatcgaatctaaacaatgtgttatctcatatatagcatcacatgactaccccaggagcttcgtcttttctgggatttgtttccaccaaaagcagaaaggccttttggctctctcatggttgtttcctgagtccttttctttctcacctcctccctcatgctcctcatacccttagcaaagaatcaattaccagctttagtatagtccctttgtctatatatggaaaatgaaaaaaagtgtagtgacatgtttagtgcatgaaggaatccctctgaatacctatttttttttccctgacaggtagaaacaataggagatgcttatatggtggtaggaggtgtaccagtgcctattggaaaccatgctcaaagagtggctaattttgccttggggatgagaatttctgcaaaggaagtgacgaatcctgttactggagaacccatccaggtagagagcaactgagtacttggcttaatgccaaacatctcacacacaaaagtagaattctgcttatgtgcttaggtgattactgggtaagttgctgtcattaaaatgggtaatgtatcctagcccttttcttctcttgcatatgtccctaatagagatattcctaaggctcctatagtctcaacttttctcaaatttcagaggaggctgcggtgctcaaggttttcctacgattgactgcaagcttcctttgttggtaattcaggacagtgctgagcagttcttcctatttacctagcagggctcaatccatcttaaacaccagctcatttataattcctgcttttatgttcaagcatttcaacaagtggttcaggtttaatgagcagccaacttttcctgcttaggaaattgtgtctccaacatgccatctgacaggttcagaactcaggctgaggtgtgaggctgcctgcagtcagcaggccaggcaccgtgatgccgtaagatattcagaatggctttccttccaccaagtggccactagcgagacatctgctcgcctttctcacagaaaagtacgcttccaagtctggaagtttgttcacactctaaaagttgaacagttttggaggtgaaaaatgaatgtcctcctccgctggctcagcagatcctaatgctcctgggatggctgagagtggcgtctctctgcctttgatttctaggtccttcctctgctaatatcagtcagaaatttaaaataaactagtcaattcaaaataaacaaagccaattataagatggaatatgatttttccacattataactttttacaggagattctgaaaatctgctgcactcactctgaccatggtgagttagaagctgagaaacagtgcagatcatggctacagcatccactgtagtcttctaagtaaaagctggccttagatagtcacaagaacaagatagctgccataatgactcattgtaaacacagtgtgcatcagtggaataaaaatccaatgtaataaataaaaaatcaggatgagaggcaatgagggaagagatataagaaggttagataagagataaatgtttcagttaaaggatgcttgtgtaagtcactggtgaaaaataaaaataaaaatggaaagcatagtgtgcgtgtgtgtgtgtgtgcgtgtgtgtgtgtgtgcatgtgtgtatgaaaggggcatagcgccagagatgaaaataatgctacaccaataagaatgaaattagacaatgaattgttggaaactctcaaggtggatttaccaagaaaaaaataggaaaggatgttagcaattccaaggtaagactatggacataattaggagcatcattaaatatccaccagaaacagcatatcatatgggtttattcaaggatgtaggggagagaactggaaacactttctctcttaacagaattgtgcaattattttgcactgagatattctattattttattcatatagctttaatatacatttactgagatccatccatgtatgagacagtattactaggtgctttgaagggttcagagaatcctgttttcctagagaaattataattttatttcaagcagaagaaaatctagcaagtaaaaacaacaagcaatctgattaggatgtagaaagctgtaagagactgttgttcccatgctagcagttttttttcccccaccagaaagcaaaggaatcaaaataaactaaattccaggaagtgacaaacctttcaaagagaagacacccataattgcattcaatcctggcagggcagcagaagaagtaatccaccagaggtgagggtagggataatcccgtctaaattttagtggacttttaatggtcacagggctgaaacaacaggttagaatgccaaagagtcccagccacagagtctgtacccatctaccaactcttcctcataggccaagtgcaggggattagtcagccaaaaactaggacaggagaggagagctgagagaactcccgagtccctgaggtgtttggggcctttcccaaatgcaaagcagtggcccattaaaggctaatgttagagtaagagaactgagagaaatccaactgaagtactcttcgtcttcaccaagtacactacgatgaccttttgaagtatgagggcaaggaggaatggcagagaaaattttcccaaggtgcagagagccagggtgggactgaagagcaaagagacttctgaaaatctcactgttgggctgtaatgcaggaggagatctcctacaactccaaaagctgtggattggctgtacagcattcaaggtcctcagagtcttgctggtgctcagattctaagctctgctgtactgaaagttctgattcagccttcataatatttgaaaccagtggtgcatggaatctaccaatatttctggaaaagccctgacccaactcaaatatggattagatttacttactgcccattccagcagcctaattctgtagggatgtaacattttctggtggataaatattatctacttcagtctctactgtattttcacacacaatatgggtcattcaattagataatgaaaaatatgagatgcaagaagcaacaagaaaatagtaatatagtggatagccaatagagaaaatagtcaatagaagcaggtccagaaatagcctagatgttggatctttaaaattagtgtgataaatattttaaagggtctataagaaaaggggcaaaacaagtgtgaagatatgggaaatacgtacatactgtctatatttacatctatatctatatctaacagaaaactatgatatcagaaatcagaaataaagaattaattttatgggctcaacgaagactagacacaatagagaaaaaaatcagggaatttgaagacagagaaatagaaatcacccaaactgaaatgcaaagaagaaaacagggttaaaaaggggaacaagacactctatatctgtaggacaatatcaaatggactcccatatatgtaactgaaatgctagaatgagaacagagtgagaatgggtaagaagaaatatttgaagagataatagttgagaatttttcaacatgaaggatatcaatgcacacatccagagctcagcaaacccaagcagaataaatacaaagacaaccacttctagttaaagcataccaaaaactctacccagtgaactaaggcaagaagaagaaatataagacattaagtttggaaatgaatgaagaaataaaattatcattattcacagaacaaataatggtgcacctagaaactcttatacaaactacaggaaactacaagatctaataaatgagtttagcaaggtcatagcataaatacaggaaaattaattaaatttttatatgttaaggacaaaaaattgaaaatgaaataaaaagaaaataaacttaattaaatttctaggagtaaatctaacaaaagatacatatgacctctatgcttaaaactataaggtattgcttagggaaattaaagaggacctaattaaatagagagatataccgtattctttggaaaactcaatatatttaagctgtccattttccccaaattgatgtatagattccgtagaataccaatcaaaatccctgcaagcttcttagaaaatattcacaagctgattttaaaatttatatggaaatgtaaagaatctagactaacccgaacactcttagaaaataacaaaattggaggatgtacacaactaattttaagacttattctaaagcaacagtaaaaaaaaaacagagtgagattgggagaagaatagacaaagagaccactggagcagcacagagtgtccagacatagactccatgtttagtccattgatttttgaccaaggcaccaaataattgagtggggaaggcaacctctttttaaaaaatgattctgttaccattgaatatcatgtggaaagaaaaaatgtacctcagttctaccttaccccatatacaaaaaaaatcatttgatatatatcacaaatcgaaacataaaatctagaatcacaaagcttcttgatggaaataaagaatagcatcatgactttggggaaaacaatgatttttttttttttagataggacacaaaaaacactgaccatgaagggaaaaaaatgataaacttcattgttacaggctgaattgtgtcttgcccaaaattcttattttgaaactctagtactcactacctcagaacatgactgtctttggagctagaggctttactgagtaaaatgaaaccttaagagtaagccctcatccaacgtgcctgatgtccttataaaaatatgaaatttggacgtaaagagacactaagaatgcatgtgcacagaggaaggaccacgtgaggacacagcaaaaaggtggacatctacaagccaagcagagaggcctcaggagaaaccaaccctgcccacagcttgatcttggccttccaggctccagaattgtgagaaataatttccattgtttaagctacacagcctgtggtattttgctatggcagcctaagcagatgaatacattcatcaaaattaaaacattctgcttattaaagaaaataaatacacaaacccacagactgataaaaatatttgtaatacatacatattacatatccaaatatgtgtacaattcatacacattaacaataaaagacaaacagctcaatttttaaaacaggcaaaaaattgaacagacttttttacaaaagaaaatatatgaatggccaatgtgtgtgtgacagtgtgcctaacatcattagtcaccaatttaacgcaaattaaaaccacagtgagatatcatttcacacccacgagaagaccaaatgatggtgaaaatgggaacaactgaaagtgtcacgtcgctgatagaaatgtaaaacagtaaaacaactttggagaattgctgggtagttttttggcttgttttgttaaaaaataaaattaaatctgtatctaccttgggactcagaaattccacttctaggtatttacttaagagaaaggaaaacatgtctacaaaaatatctgtacaggaatgtttatagcagccttaattttaatagattcaaactgaaaaataatctaaatgttcatgaaaaggagactggataatgaatgtggtgtattctaacaatagaatgctattcagtgataaaaataactactgatatgtaagacaatatagatgaatctcaaaaacattatgttgagtaaatgaaaccagatataaaacagtatatactataagattgtacatatgtgatgttctggaacaggcaaatcattctttggtaaaagaaataaaaaaggccaggcgcagtggctcatgcctattatcccagcactttgggaggctgaggcaggtggatcgcctgagttccggagttcgagaccagcttggccagctggccaacatggtgaaaccctgtctctaataaaaatacaaaaattagtcgggtgtggtggcgggggggcacctgtaatctcagctactctggaggctgaggcaggagaatcgcttgaacccaggaggcggaggttgcagtgagctgagatcacactgcactccagcctgggcaacaagagtgaaactccatctcaaaaaaaaaaaaaaaaaaaaaaagaagaaatgagaatgtagttatctctgctgaagaagatggggagagagcttaactagaaggggcacaagataattttgcaaggtaatggaactagtttacattttattttgggtggtggttacagggatataagcacttgtcaaaactcatggagccaaacactttaatatctttttttattttatgtaaattatatctcaacttacaaataaaatcaagagtattagatggtctcttttcagtgatgctgtctctgtacagctcagagtggggatccatactggaccagtcttagcagatgttgtaggagacaagatgccacggtactgcttgtttggtgacactgtgaacacagcttctaggatggaaagtcatgggcttcccaacaaagtgcacctcagtcccacagcctacaggtagccttccatttattcatgccttcctttgtcccttcctctttctagaacttacagagtgcctagcagccatgggttggggtagtgcaggaaactcatgtttttccttccatgtctcaatggcttacagaagatattgtggcagataataaatttagttgagcttctaactgtagcatagtttttactgtcaaggagcatatagtttagttcagggaacagcaaagtataaccccacagaccaaatctagtctgctgctcatttttgtaaataaagttttattggaacacagccatgcactttcatttacatatagtctatggctgatgtcatgctacaaaggcagagttgaatcactgcaacaaagaccatatgatacacaaagtctaaaatatttactatctggtctttatttatataaaaagcgtgctgacctttggtctagcagaagaaaaaagaaaagttgtagttgattatttttaaagtgagataagtacaatgacaaatatgtgcataaaacaatacttatagtttcttgagcacttaaaataggccacattctattctaaattcttttatatgttaattcatttacagttgcaacagctctgtgaagatacattattattattatttacatgaaagaaaaggcacaaaaaggttaatcatttgcctcaggaccaggtaggctaggaaggagaatagcccagatgcagcccacggagtcagagttcagtgtcccccctttaactgctgcactcttatcctcaaggtagtcaccgggggtgtcatgagagcccagggcaagggtgcttgacccagtaaaaaagggcttcatggaggagattcctgagctgaatcttgagcaaggagttccagagtaaaatttagccaaaattggggtattgggagtaaaaagtgggtagaggctcacatgtagaataggtgcagagaactataaacacccgaggttttctgtattggaaaatatgaggcaggagcagtgagagctgcacatgccttactgaagggcaagagccctatgccgtaggtgaggaaaagcccccaacgaatgtgaggttgaagacagtgacagggtcagggtcctatttgacactgaccactctagagaccctgaaagggcatatttgagaaccagaaaatgagacagatgagacctgttaggagtttggtctgaatcagaacattagtggtgggaatatgggggaaaataaaaccagctaaagtagttagaaatgggggatgagaagaaggggggagcccgggtctccattctgggtgactagggcttgaatggtggcctggccatctgcaatgggacaaatgagaagtatcccagatcataggggcagacaatgagtttaggttggacacgctgggttcaaaggaactgtggaacattcagctagaggtgccataaaatggatggagttgagttattgaagatccagacttggagtaagcaacatataggtggtaataacagtcatgagagttgatgagatcaacccagggaaggatgcagtgtgcaaagaacagtgggaaaagaatggaatcctgtgcagaaccaatatttaagtggcacagaaggaagaggagcccagggaagagacaggagaagaaatactcagaaaggaccaggagagttgagggtgagaagcactcttgtggatgactttaggaaggaagaattgaacaaaaatgtcaaatgtagtaataaggactgaaaaatactcactagaggttttggggacattctcaaaagtggttgtagtagaatggtgggatagacgttgggctgaagaataaaaagaggagaaagtttgcatgagattaaagcaggtgagaggctgttttgtttgtttctgtttaggatggaagagacataagcacactgaaaagcagaaggagaaaggcaaatggaatgggagatgaagataagcgtggggtggccaatggagcaaggcccagaggtggtgggaagggggtgagggtgaggagaccctggacaagaaatatacctcatcctcggagattgggggacaggatggtgtggtcatggggtgagaagtcacaggctctcacctgtaatcaatgtaattttgtagatgaatcagggcataaagtaggaggcacagccaccagcgtatgagtgaggggagcagatgccaaatggaggcccatgaggactgtggtgaaggtctgaactctctaccaacctggccaagggcaagggaaggctcgatggagtgccgaggcaggtggtcatgaatttgaatcctcattggtctgagtggttctttggcttttctctaacatcacttggtggctagtaaataaataaacagggaaacgttttgtaattaccccatagctctgtctcttttcatggtcccttccctatagtcctcctcttcagttccttggcagacagaaattgtggtggagaaagcttgggtagttaggatgagcatagtagcaagcatggggtatatggtgcacttggggaagatggaaagaagagtgttgatacccaagagtcttacgtggcagaaacatgaaaggtggtgtccacatgggcactgacagcatggtgtgtagaaacgtgagagatgcccatatgagggttgagctggagggaggaaaattggtggcagggttgggagggttttgatgggtccctgtgttctcttttggcctttggcatcctgttcagaatatctcatcctcactttccccacggcctctgtcctgcttcagcaggcagatgtctgggatcttccctcccctgctgttgtgtgtcctgtgtcctggacttttcctcttgagtagccctttgcattgtagccaactcttgagttacagacccacaatctttgatatctgatgcactttttttctctgtgcagagccttgaaaaatcaagggtttaaaatcattgagaggggtgaaattgaagtgaaaggtaaagggagaatgaccacatactttttgatccagaacttgaatgccacagaggatgagatcatggggagatctaaaaccccagttgatcacaagggtaagcaaaaaagagaagctttgtcattagtgttgagtagtttttccactaaccacttcagatatgtttattatttgcagggtcaacacagaaagcatccttgcccaccaccaagctccagggctcagttcaaccatcttgccctgaacactcttctcttgcatcctggttattatgacgttctttgagctgggccgatagatccagctgaagagttctacatacattagtcttcaaggttcttctctgggcgtttcccatgcagctctctggtagctggggaatgatttgtgagtgcttcctctgctccacagcctcagaggctccagcacaggcttccctcgcgtgctggaacctttttcacattttgttctagcttccaaaactgggatgagggacaaaatttgtgactcacccagctccaggaatgacaagagggtgggagtttagggtaaaaaaacccagtactaagctggaccagggattactgtttggctcatggtacccccaaaaagaagctggaatccaatggcgagctctccatcagctgcaaggctgatcagtcccacacactcagggtcccttagccacagcctggctaagacagaagtgctgacctgaaggggaaacctggtaataggaggcaagcctttctgaacctccaagaagggaatgaattccttctgacaggagctaatctttagccactccagaggcccacaaggggaatctcaaagtccagaggttccttatttacacagctattacacgcagtatgtctctttgggacatgtggattatgatgactatttttaaaagtggggctatcccaaagaaaagatggattatttgaagaatttttaaaattgttgtcataatgctttcattctaatatcagctcactgtagtatccctgtgagctatagttggtttaggccacattttactgttgtagacactgagatacaaatatctaaataaaaaacaagaaataactttggtaataaggacgaggagcagtcctcattagaggttttagccccagaatttccaggctctgggcacctcatccactgctatctcccactccctcccacccaccatcatgccagccccacagtacagagggtttctagagagaaggcaaacaaacatcccccccttttctcttcttcgttgtcaagaaatgaacaaagtaaagtggggagggggcatcatatcacgtgatcattggagaggggaaggcagggctggaggctttggcacaggacagggcagatgggtctcagctgtgcctggctgtaaccccacactgctctctcccactcgttcactgagggttcccacacttcttagagaaacagtattccggagcaaggtctgagtcagtagaatcaaacccactttcagttctgagctagggaaaagcaaccctgagtagaaagtgaggaagggtgcctcaactgggagccctcagaatggagcctgagaaagaggagggagggtaggtgtgaaaggagggcaggggatagcagcccccatcccccgaggccccagtcagtgtctctgtgcaaattaagaacaaggacccctttgtgggctatggggtcgacagcccccagacatggcttatcatagaggaaaatggcaacctctgtgtggactgaggtcagtcctcaccctgaaccccttggccaggtgcctccatgtagagaaaactgcacaaacatatatgtggtcccaggaaggaaggatcccaacccttttcatgcttctgtgcatttcccagtcccctctccctttccccagcagccttggatttcctgctgtgagcctcagccaccaggctctgggggagggtgagtctgtctctccctgcctgccttcatctgcagcatgggggctctagcaggaaggccaggaactctcaggggagacctcatgcagatactgcttcctaaggaaccccattaacttccggggtccagggtgttttctcccagtgaccactgacatctccatgaggcaagatagagcctctcaaagacagtgatgggggaggggcatggaaacactgttatgttcactgatactcttttcacatgggtctattccctcagattatctcccatgggacacacacgacttttttgggggggttacttagggaggagcagcagcgagggcacttcagtgattctagtgtgcagtcagcattaagaactatgtctaagaccaaagcaatgcagaagaaagggccctgcagggtctttcttgtgccccactccaccctagcacaaaaagacccagaaggtgacagaaacaagaaaggatagtgtccaggagagctcttcctcaaatgagcctcctctcctccacttcgttctcaagacagtgcatttcctcgttctaggtaatgagtacatgaaacacgttaaatgtccttcagcctccctaccacgacatccaacagctggaacttccatccagtccttcacatgatgggcacctgtgggaaacctgccaggggcagccgatgttcagaggcatccaaaaaaagtctcccacttcggcagccatgaagcccactcatgcaaccgtcctcacttttccttcctctcacggttttttgcagaagcaagtgctcagggaaatgaagacaggagaactgctgccgtcatgagctatgccgacagtcagcagctgatccccgacagaaacgcagcagatgcagacggtgagtgcagcaggcctggtctaaaatacttccagccttgcattgctcataaagacaatcggacacttcagaggtcacttcataggcagtgagaaagagccgggaagggatagcacaggtggagtttggtgtcccggggcaggacgctactgacttgcttgctgtattttgaataaactgttgttttgagcacccctatcccaggtgtcccaagggctctcattccggcagggccatctatactcgcttccaaaagaatctctaataccagaaaaacgtattactttctgtgcatccacaaaacaaagtttctctggacagcgtggccctcagtagcttgccttgtcttgctaaggagagctgagacttcctcttcctgcactatctggtgctttacagagacctcagggcattgacacttccgcagagtagcccagttactctcttctccactttgtcctgagggtcgtagggacaggagggtttgcttaattcatgcttattctggacggccttggcagtcattcagctccctcagagccagagccattctcaggactgacaaggcttggtttttgagtatggagtcacaaaggaataatgaagaaccagggatgggtggacaacatgaacccctgtagcagcagctcccccatctttttctagaaccctcatgctaggtgatccgtgtggagttaaaagcggcacggccacagtatagaggggatcacatctcatgcattttctaaaaaccatctctggtcactgagacaatttcttaagacaaatgaaatgatccatgtgatgagttagaacagcttaataatccatataaaaagtctagctctcgttatctttattagacaatatctctaaagttgagtgttgcttgagcccttggcattggcactgccctgatgcccaaaggcttccctctagcttgatcctagaacctgaggttgagggaatgaatagcagcctcctgttcatttcaggtgagaggagacagagcaaaacttctctcactctgatcctggggtcagatggacatttgcattctgggacatgagaagctcaaagcaaagtttttgccattgcctggaggcatttccctcccgtccccactcctctccttcctggagttgcatgtttctggcagtgcccaaaaccctgaatagttgtccaacgtattacaggatagaattataacactcataggtccatttgatagtgttccttggaaaactgttgctgctgcaggaatggacaaagcatctagtcactgtcctgggatctgcaatgctcactgaactaaacacatgagattcctgcctttgggcagcttgtggtttagtagagggaaacagacaattaacatgtaactaaacaaataagatcattggggtagtgatgaatgttaagaaaaaaataaaactcagtagagggccagtgaagtcttctgagagggagcagcatttcagctgagacttggatgaaggaagaaaccccatgtggctacctgggtaggggcttccaggcagcgctgtgcccaaggcagaaacagccttggcaagttcacaggagacaagaagaccagtgtgcctggaaagggctgcaagaggaagggagacatagggatgaaatcagacaggtgtgtcggggcctgggacagtcttggccttgagactgcttatcaacgtgcaaaaaagcatgagcatgaaataaggggtaggtgaggaggcgctggggctcccggagaccttcagagggagaacggctctgccatttgaattcctaaatggcggttccataaacagttcagaagggaaggtctaaaaaactctttatgctccaggaagatgagtaaattaatttttcaaacttctgctgcgtgggagatggggaggtcctgccacagggaccagcagggctggatgtcttgcttagaggtgagagatagaaatttcacagcacctcttctaactgtggctttcctggacaaaaagcaacactgaactagagaaggaaaaattgaggccacctcagttttggggggaaactcgagcggtgaactggcatttttttggcaactactttgtgccaggcattttacccacattatcttatttacacaacagttatataaggtcccacaactagtaagtggaagaaatagcatttgatcttcatttcagacttgtttgtctagggcagatcacgtccgtgtgagttcattttgagcatcagaccaagacaattccatagtttccctaagtggtggccactgcacttgaactgcttgggttgacaatggcccagccatttgtctctcagatcctctgggccccatctgaacagatctctgattgttcggtgtgattagcaggtgtattaatgaggaagcactcccacactgtgggttcatgacagactggtgtgcaccaggagtgccactggacccaaagctacccacaccgagacgtactgaaccagaaactgccctttcacaatgtgccccagtaatttgagtttgggtttaccactgacatgggcttcttcctcatctttgacagttggcagcagacatagaatttagcagtggaggactcatgccacctgctcatgggagctgcctcttcactgtggttcgggtcccggttctcatgggttttcaggtctagctaggtctcctatatcatgcttagctctgaagtcagtgaaggctgccagagggtcactgtgggagcccccagcctcgtcactacccctgggccatcctgcccggcccctatgtgggcatcgcgatggggaagtgtctgcatcagtagccatgacctgtcaggactcctcagagaccaacctgcttctcaggctccaggcagctgggtggacgttcaagacttgcttcgttcatcatctctgccaccaatctcaccaggtggtcacctggctgccaaacatgatggctcttcagtggcacaccattccatctgacttggccctcttgggtgggaaacgggcactcctggccccctctccccggagaggaccgtggatcctgacaaagtatctcagagtcttggtagcctgtgcagctgcagcgcacctagacttctctctgctggccagctgaggcctggggctcacgcgtatctcgaccctctttaaaaagggggccacagggagtccctgcaaggcccaaccaccttctgccagggcagtagggagcgctcagcgggacccaggcctgcaggctgcatggaggacctcatttgcacttcaataacatgcttttctttcacttaactatatatcttggtgttagatttgtcagtggagagactccctagtgcaattaaacgggagtattgagccggagagaaatcagtgtgtgttgactcagatatttaagcaaccacctttcagtattgactcagaaattggccttccagctgtccctgctggcagactcttctggcatctcgtcaggccgctgttaatgtgtttttcaaatttcaacttgcttcaacttgtctcctaactgatcctcctgttgatgacaataatggtttccaggctgacctgcacacagcacttaggcaagcagcccaggcccctctctggaggcgaccccttccttataaatcacagtcagagggcgtctgcttgctgggttcatggcaggttaagtcagcttgggggacttctcaagcaactcctaattgttcctctggagaacttgagtggtgagggtctctctcctgatgaggttagactttagcggtctgctgctggaggggttgggttgctgattccctccaaatttcactcactcttccaaacaggaagaacttttccaccatttgcagtctccctgatgagtaattattggatgggtttgtggtcacttaattaccagggcccttgccccttgctttacagagtcgtgactatacgagcacctttcccagacgtggccaattagggggggcccagctggtttggagccaggcttctaaggaaggctgggtccctgttctcagctccgagccctttctgcagcctctctcagtccttcctaagtgtggctgtcaaactttgctgacctttcccccttggggctaatgagtgtcacagctatttttaaccttgggttttctagaagttgagccgttaacctagctcctacagaaggaggatcctgggaggtataaatgaactcttcacacacaaggaggtgactaatggaggaacataggattttcagtgtcagggctagccttgaagttttgtgttgacacccttgatagcatcgaccagatgtcaaatcagagctggtcagcacaggcggcatgggtgggagggcagccagaccatctgtggaacaacctgttcatagtatagacggctgagcctcacctgagagggatttggcaagtctgcagtagggctgtgactggttcgttaaccaactttataggggattctgatgagccaactggcttggggatcaccatcgtgatggaaagggcaatagactgaaatcagaattccaggtcctggcagtcagcgacctgtgtgttacttcgggcaagtcctcttcaagacatttttctcatcctgaaggcaggggtaatggcgggccttcttcacagggttgctttgagaaatagatgagatagtatgtagcacctgaaaacagcagagtgtcaggtgtgcggactgctgagtcacttgggcattcattcgcttaacaaatatatgggtcttaacacaaaactgtaagaggtactgcagaggtttgtttttttttttttaaatacgatctgttgtgtgcgaagagcttcagacaaatgggacagaggaatccacatgggaagtcaggctcccagccttgtgcagggcgctccagcatgacagtgtgcacaagtgatgctgaaacacacactgggatttggaaaacctcttagacaaggtgcatgcaacagcagaaacaagaataggcaaggatctgctctggtctctggaaaatgtggggacttctggaagctgggaatttatttcctgcacggcatggcctcttttgttcatggatggaaagaggcaaccaggcagtgtgatcctagaacagccaccccttccctcatcctggaaatgccactgcactctttgtatcgctagggtagaagtatacactcactggtagaatttcccctaaaatttcatttttggaatttgtgtctcttttgtctgttcacacatcccctgctcttcctctaggatgagggtgaacgctgggaaaactgagatggaagcaagtgggagcggtacagggctctgcacaagtggagaccacacagagcaaaggccagtccagggtggggagagaggtgggacggtggcacaagccctgtgctgtcaaggaccaggatggggtgaagcggtgaatggggtgaagcggtgaatggggtgaagccgtggtggtgcagggccctggagaagactgagtgcctgatttcaggctcaggccaaaccctccaccccagtcgtggagaatcagtgttgaaaccaagatgtggtcttccatatcttattctgtttagaaggttagaaacagatgcagaaatgctatgaagtgattatcttaatggcaattgtaagaatccttcttgtaaccccatatcatatcgtgtatgattcatagagcctgcctgtgataacaggtgatgatccacatcccacctctattccccaaggcaacagcatttcctcacattccatgctgctatcgctgcagccactaccacccccaactccccagcctccaagtttgtgtttgacaatctcacatgataggtgttttccaaatgggaagatttcttctgcaaccattcttttcatttaatctgttcttgatctacattgagatagatttctgtgctgattttaatactgagctatgtgatttttccaattaaagactatttgtttatttgtattatagaagaaatatttaatttttaataagtatggataaaccaaaagaagaaaaccaaagcacctataattacatcattcagagagactactattaaaatatgggtcatatcttccctgacttttatatgggaggctgtgtatatgtgtatacagacatgctttttcttacaaaaatggaattgtcatgtatatactgttttgtaatctggcagggcatgaatttctttcctttgaacatttaaacacttaataatactgaggaggataattttaaaaagatataatgtgcttcacatggtacccttatttcccatgtgacttgtgctattacatacccccaaaccacttttacattgtaccaaatgaaaatcccaattatcttatactacccacatctacaacacactttggtacccttgatgttccatgagtcctgaagtttcctctaaattttccaagaaagactaaacttgttcaagttagctttggtgcttagagtatcccaggtgtctagatgtcagcaacacatggaagatgtaccttgtaatttctattaattggaaaatgtaattaaccagaaggctacatttcccaactgtgcacaacaatgagcattaactgtaacaaaatgatggtactcataggcagtccttgggggttgtgaacaatggttttgtgggagcgaaagatgatggacgagaatccatctcaagtaaacaaaattcttccagcatctggattgtggaactgaattggagtagaatgtcaaacatatatgtgtgaaaattccaagacagccttgcagttctgcgctgaccaagtcttgtttgaattgtcagaggcatcaacccaaattgatggagtcaggtttggcttgtccaactttcactgtgctgtttcagttcattttctcagcacagtcctagctgattgtcctttctgtctgttctctgttcactctttagggagagaaaagggaaagaagaaaatgaatttaaaggaaataggagtagaagtggaggagatggaagatccagttaagatacaagtgagagaaatgaaaaatggtcaggctagaagagagaaaaatgtgctatgaggcaggagagatgaatcaacgctgaaaagctacatttctgagaagagaaattgcaaggggaaaaaattagagtgttgaataaagaggagacgaagatatctgtaaaatattgtttcctagtgttgagcttactccaaaataccttatgagaggttaggccagaaaatagattattccttttggttacaaagaaatcatggtgctctcaggaagcaagagcagatcatgaacacagcctgacagctgctgggtacagggaatggtttcctttaccgtatttctgctcattttagcaattccagccctttccagctcagttttcattttcactagagtgacctccacttttcatacaattacaaacatacaaaacaaataagttctgggatcacaacacttttgtggatatttttttctctcaaagattcttataacatttctttgagttgagggggagacagatgtgttgtgtggtgttgttttacatctggagaaactggggcacagaggagtattgggggagagttcagctgctctttgtagtgctgttgggtggtgatggatgtggaggcagatgaccaggtcttctcaacagaaaaaaattacacttccatctgtaatcaactcattttttctctatttgctatgatgacaaaacaaaacggaacccaaatttcacaaatacactatttttatcatttaacctgcatgtttccatttttgaaaaatttagttctaattataatagtttttacatctcaaaaaatacaatactgcaataaactccataattcaaaatgaaagagagtattgggaataataaaattagtagagaatcagcaaaaagcaaaaacaaaacatcctgtatctgaataagtaacagtttccaaagagcataaaatactgctgaatataattcagtcgtgtgtgtgtgcgtgtgtgtgtgtgtgtgtatgtgtgtgtcagagagagagaatatgtaatagcaatcaaatgaacatatagctaatgatatctgtacttagctaactctggttgcgccataccctataaaatgtcacagttgagagtttcatgaaccttgattccttttcagattggccccaatatatgcatgagctaaacgcttcctgtaaatcattgctggaagttgcctcagtgacatggccctacatgtcccaggaatccccctttctctgctccagggccctctctccaattttcacctcattctgggcctgagactgagatgagactggggagaggtctggtagccccaaattttccacatgtatgtcatcactgacattcctcaatgagcagtgcattagcgaatggagcctgtttctgtctcattgtttgtgctcttaggatcttaaaacaaaaccgatcactaatccaggttcaggatgaagtctgagtgctaacagcctctaatagtgaaaaaaaaaagtcatccattattttgggaagagaaggccgaagacaggagcccctcttgatttcccgctttctataatactagatgtacgtgagcctcagacctaatacatgcgcctttctgaacttgaatatctctgggacaatgatttatatttttaaaaaaggaaatggcaatgatatatgactttaaaatctcagacgctgcccttccaaatgaaactgcagggaacgcgggaggagatagattcagtgtcctccacccggcctctatcccattccttctctgatcccactctctctcttgccttggctcacagtcccggaggcggtttttctccagggccttctcccagggctccctcccatgcttagaaatactaattggcatctttgagtttgtgctctatggggcattgcgtgactcacttggtataaatcatctagtttaatgatcataacaaccctggaaggcaggtgttatttctccatttttcatatgaggaaaactgaggcccagagagcttcagtaactcatccagggttacaggtcaagtagtggcaatgctggctctgaccttcagcctccgtgtctgctgctcagaagtcacagacagccacaggccagaagacaaggagacttggtgctattgtgtgagttatgcagaagcaaagatgtgggtatgaccaaaaagatggcacagggcagttcaaagaactcatatagccacaaggcagtggtctgtccgggctgtttggccttggctgtgaagaattcttcctgtccaggatcacactgagtagaaaaggaggcccgtagtgtccacacgtgttccccagggtctggcccagacagacagtctgaggctcgatcacttgctcacccctctgtgttctttcagctcctgatgaaatcatccctgtggggagtgcagggccagatggggactccatggagacagccgaccggcgacagccttcagctccgacaaagacacatcaccttgcaaatgacactttgccgtctggtttctgtgttttgttgtaacaggttaaatgaacccctgggcttaattttccccctacttagttctgtggcagcaaagaaaagtgacttcttttcatttctcagctcaaaacttcttaagccgtgtctcttcctcatcatccctttgagaataaaagtctagaaatgaaacacaa

SEQ ID NO: 56 - DNA, 48670 bp, Homo sapiens
ttggctgggaagaggtggcaatcagggcgggccaaggcggctgttctcgctccagctcgatgctgcctccccggcccggttgcgctgtagccgctgccgcctctgcctgggtcccttcggccgtacctctgcgtgggggctgcctccccggctcccggtgcagacaccatggtaagtgctctcagccgggtgcggcccgaacctcacccctcctcggccggcctggcagcgagggaactggccgcgcagccggagcttggctcgggggccctgggcgctcactgccggccacgggagcagcctcactccttgcccgcgcccagtcaggggaggtgggaacgccgcgagtcgtggcgggggcgatcggtgcctttgcttcccaggcgggtttgccgctccacaccgcagcttcctgagctcgggaaggggaggtgcggcggaggcgtggggtcttcccggctctggccggccccaccagtgtgggaggctgagcgccagcggaagggaaggctccgggttcgcgtccccgcgctgcccccgatgcccagcctctcccggagcggtgacaggtgaggagggtgggaagatagcgtgggggtggggcggatggtgacggggagaatccaccagggattggggggttgcgcccccacgatccgactcctttagtgcatagtacccctaagggagaggagtcaggggcggggtgaaaggttaagccagcgccatgggagcagaggcagcagcctcgcccccaagccgcttctcaggtacagcgggtccctgacgctcaagtctctccctgtccccgcagtacggatttgtgaatcacgccctggagttgctggtgatccgcaattacggccccgaggtgtgggaagacatcaagtaagtggccggctaccctggctgtggcccaggtcggcgcccagtgtgggaggccccccgcgcctcgcctggtcctcagcctgctggccgggtcgcgggcgcgcatccttggaggtgcctccgcgcctcgctcccggctcgctgcagctgcgctcccacgctccgggactggaaccaggaggggaggggcggctggggcggggctgcgagggcgagaaccgcggaaaggagcccctaggggtcaccacggcttcccgacccggcctgagcgtgggaacgcgctgccggcgctcccaggctcagcaggccgggcagctcccacgcgtgcagagccccgagggaccacacgggcctccgcgaggttcctgcgcccggaggccttagaaacaaacggaagactttggctcctttatgatttacacacctggcgtaagttaggcctttttggtatgctgaaacacgcgggagattatttcttgagcaacagtgaattaagcgcatttattcatttttaaataaagtgaaaattggaagttttttgttttccccaaatcccactgcccaccccccccgccccaacccctatcccccgtttttttctactgtgttgaagacttaacagttctaggaggcattctactttcagtcctggagctttgagcccagtactggggatgtgaacggaaataccacacccacctgagagtttaaacctgttggaatgactgatgggtcagcatgtctgcaggcaggttgactatttcactctaataaagttgtctctcctttttcctctcactctcaaaaaatttgcatttaacttatggtacagctgaccaccaccaactagctactccaaaaccctatttatggattttcatattagagcaacagtcagactatcacattgtaacaaaggtggaaggaagggtttcctgggtgggcagatgggaatacactgttattattcactctgatttcctgtacttagtgatttcattttgttgtctcaggtaggtgaggcttccatgctgtttttccctaagcacattacaattattagcaatcaattctaacaggccttattatgcagttacatgatggtgatttctcataacgatctgtttccatagaaatgaccagggttatatattaagcacgaaaatgtaacttttctttcccctggatctgtatcactgagcgtttctttcatgtttcagaaaccatttgtattatccacagggcatattacctacatattataaacagaagccgagatttggcaagtatgtggttgaatccaatgagaacataggcaccaaaagttactttaggatttgaattttctggccatcttaataccattataatttttattttgcttagtagacagatatcaacaaggcagacatcaaaaaaagattgttaacagtataacttaactaccgaattatttttaagccacttcctttgtaaatttataaatgctatatatatatatattctccatatgatgcttttgcatctgtaagatagaaattcccaaatttgctggtagatatgctatgacaatgaatatgcttagaatttttagagcagaataaaagatggctattatgattaaacagtcattatgtaatttaaccagatttagattgtatatcctagccattatcagtttagatcactgttaaatacagagatgaaaaataatactttatagagtaatgtatcagacattttaaaaagttaaaattatccagagatttgtttatattgcttatattttcccagaggaagtccaaatatgtaaagattcaattgacgagaatttaactctgcaaaatcaagctgagaatattgttccattctactttaaaaaattatttattaacttactaatttatctttaagtagcttccaacagtattcataatttgtctaaaggataaaaattccaatcatccacaacacaatttttctggtaaaaatgaaacaagttatattggtcttttcttaaataaaattgcctcaaggttatgcccctgcaagggaaaaagtgttagtcacactggtgttggtaatccaggtgttagtgttgattctttatttgtctaagcatcttttggtggaccccagctgatcttgggtgtggtttagtgtctgggctagagaacatggttgaactctctgcactgagggcattaaagctgctccttggtttccaacccaatacccctgagtaattactaaatgctccctgggagagcatttgctttccacagaaaagaatcttgctgcctggggagaggggaggagaacctggaggagtgtaattgaaaaatgctccttgggtgattctggttcctcctcccctccctaccctctgcttcagggaatattaaagcagtcattggtccaagatgctttcagttttaacttttataagaaattgaatataagaggaaaaacatttttttttgtctcagtaagtaccaaactcttattttttcttttggtctttgagaaactatctaaattgatgtttatacaaatttacattatacttttttgcttcactaggaaatggccatccatccttcatgagaaaggatgggaaaagatgccaaacatttaatgacaaataaaaccctaagtaacagattccagacagcagacagaaaattctaagtggataagggccaaaaatgcttcattgtaaactcagtatccacttacactcttaccaacaatataaccatttcacaaaagctttgaattcctcttaagaagaagaaaaattgtctagaccaagggccagcaaactttctcttaaagggccagatagtaaatgttttaggtgttacaggccaaggtaaaactgaggatattatgtaggaatcaatataactattaaaaatataaccacttaaaaatattaaaaccattgttagctcttggaccaggaaaacgcaaacaaacaaccaaaccagacaaagtgggctacatgtgatccatgggctatagtttgatgacctctgatttagaccataacaaatgtgaaaaagcaaaagagacctctgaatccatttcaaagttttttttgttgatttcatttcaatattcaaatagtccttttaagaggctatgatttctaagtaatgacaaaaaaattatcagggtagaaaataaataaagttaggagtgatacatcctagaaaagcacctaaatacttgatttcccatctctgttatccttccatcagccctgactaaactcatcattgcgtcaaattactgggtttaattttagattttttctctgctttctttccatattttttctgggtagcagcggagggaagcagttagagacaggtcttgctgtgtgcccaagctggtctcaaactcctgtcatcaagtgatcctcttgactcggcctcccaaagtattggattatatgcaccaccacacccagcccaactttagattttttaacctcactgaaacatacaaattaggaagatagatccaaaacactgaaaaatcccaaatgattaaaagtctgtaaagaaagtacactgtcctgacttaaataaatcagataaaacgtttatctttaatgagtatagtcaagtgttttaggcactgaggatagaaaagcaatgatgtaatccttaccttcaaaaaaaaaattctagagatttcatgatattttagtcttattattttgtttttattttcctgcctataactcaaatacggtaaccttttgtctgttggatagcatatacttccagttttgaaattaatgtgtcttgttaaatttgctaatcacaaattaatcattatggttcaaataaggaaacactttgctataaactagttatgggactttccaagttgcctaaactttccaatcctccattgcatagaggaaaaaataatacttcacagagctgatgtaatgcattgaataatgtctgcaaaatgcttaacatagttcttgacaatagcttaataaatgatgatttttttttattttactctagaatcagagtttttaaactttccgttccccaatttacttgaaagatattaagccctcctttaaaaaatattattgcagtctatattctatcagtctaaattttttttatcactctaggataagtaatcatcatcatcatcatttttcatcattttgttttgaaatgcaacaaatgctcttaatatccattgtatcaaagcaaattaaaacaaacaaaagagcacatcaccatgttttgccgtgtttattcagattttcatatttttgaaggtgtgatttaaacttctatacctttctgtagatctgcttaagtagtaatgagcctatgtatgttttaaagtagtaaggatactttatattataaagcaatttcaaatttccaaagttttgttctctctataattttggttgactgctacaacatccatttgaaataggaaaggactttacagctcaatttttttaataacaaagttggttttccaagaggttaattcccatatgtaattacttactgtcccagagaattacatataggaaactgaaaagtcagaacttcagcccttgttcttctgttgccaggtttaatgcttcttttaagatataactgtgaaataggaactaatgtagtatacatacaaaaatgaaaccacatttattttcttacccagaaacttcctcagtacaaataaacacattaatatacagactaaggaaacaagtaaaccagatcattgttaggatcaggatccttttctgtagaaagatctgccagttagcctgaaatacagaggaaggcgttgcattgtattgtgtgttggctgttaagcttactaatgtttgaagttatcttttgcagctggaactggatgcccaagtgtatactccatcacatacctgctattgagctctttgcatagggctcttccagaacctggaccatgtctgtgagcagcatggcaggcacctaggtgataaggcgggtcatcacatgatctcagggagtttgtgggtgtttcttttgagttttattttggttctgatgatctgaggtatcccccagaaatcaagctgggtcttggagtctttattttccttgcattctgtgatttttgagaattaaaaaaaaaatcagaggagtacatcacttaatttggcgtgtcggaaggatctttgcacattacggtgagcatcagaaatcagaaaatctgtattctcactcttaatgtacccagatctagttttggcaaacatttactaagcattgttatgatttgcaagaacaaagtcctttctactttcttgcctttctccagaataaggggctctagcaaatgtttctctttaatgtgttggaaaactatagttatgggttgatgctctgcagacatcaataggaaaacacacttaaggaaatgaatgctataaagaaatctaactggctagatccgagggtgacagctcagcagacgtgagtacttgcagctttttcattctctcctttgcctccttgttcgttaaagaggaaatggtgggagaaaaaatgtctttattgtttatgtctagcaaaatgaagcatctttttctgtgtcaaactatatcaaaagatagtgaagttaaagtggattttattccaggtaaaagtagacattctgaagtatttattggacctcctcgttactgtggctttggttctgttgcatattctggtctacttccccttcattgttgaatcatgaaatatgaaattgttaaatttattgaaattctttgtggtcaatcttcagataacccaaacatggaaacctttcactcaacttgtcctacatacccttagcattccagccccatgggcctgtttttagtttctcagccataccgagccttaaatgtgtccgtttaacacctgtgcttgctatggtctccttttcttcaccctcccaaccctcctgtaaatgtaaacacctctcagctttgagatgtcaaagcaaatgtcacttcttaagggaaccttctctcacatccaaacttttccctttccttcatagtgctgtaatgcaagagtttgtacttagtatttgtactactgattaatgtctatcctccatgacaatagcctccataactctttctagagtgctctctctctccctctctctatgtattcaataaaatatcaggctctctttctgtaataaaaatatggatgtttatatgtgaatgaagtatctttcacctttttcatttccaaagaatagagcacacacatatttttatcaaagattcttctctgcaaccagaatttatgtcagcatggtgacatattcaactactatttaaatataagctgttttcaaatagacatttctttttctccaagatttattgagatataattgacaaataaaagttatatatatttaaggtgcacaacttcatgttttgatgtacatatacattgtgaaataatcactgtaatcaagccaattgccatattcatcacctcacataggcaccctctttttttgtagtgagaacacttaagacctcccctcttaacaaatttcaagtattcattatagtattgttaactgtaattgttcattgtaattgttaatagtgacattgctgtgccaaataaacatttcttatatcagcaaaggcagaagatagagcaatatagcaatacataatagcaattccttttggaagtgtcagagttcttttatgttttctcatgtcatgtggatgtattggaaggactaagaactctattgttagaatgacaatttcatatgtcaaaagacaattactagattggattcaggacatgattgaatcctttagcaagtttctaaaaggcagggatgtgtggtgctgtttaaagtcagtgtcatagactgtaactcagtgtttagaatactgaaattaaatttgaaatccagctgagctctcaccatgtcatgctatttcgaatgtaatatgtcacgtatattaaacacataccatatggttctgcagtcacagtcctagatgctttatactcattatctcagttaatcctcatcaccaccacagaaaatagattccttcattatcctcattttgcaaatgagagaatagaggcgtaaaagaaagcctgcctcaaacactcagctattaattattagagctgggatttgaacacagataaagttgtaattatcatgttatgtgttttcctccaaagagaaagacctataaccttcttctttccaaagacaaccaatttagcaaggacatgtgccatgtttatgtgtattagtactgcctgctgctttttcttttttcttggaatgttcaagcatgcgtacaggtgatttttgacaacaatatttttaaaggcgaattgacatgaagcatatacacaagtgtctaagtaaattcatttgtctgttaaagctgctgaaaatggctcagcagctcaaatgaagatttgtaagttttgtggatatgttttcaaaattggagaaattaccattaagggtctcttgtgactcaaaattggagaaattaccattaagggtctcttcctgacaattgcatgtcaggaagaaacatgcaattatgtatcaagactgttgttgtttcccctaaaactaaggtatgggtgtcactcaggagagtatttattgttactgtttacagtgattggatgagtgagtgaacacattgacatgaaaggactgacctttactaactaaaagggggttcaggcaggaagtcgttactggatttaaagggcctgtctctccacttggcagctccctcaagccagagtctctcctttggggttcaggcttactgagaatcattagattaggccattgaaaacttagaggctattcatgctccacagccacttagaaaaaagcaatataaagttttacttttttagatgttatatatagttactatccacagtttatagtgggagattttagttttaataatggttggggacaatgcaacattatggtaccaattcagctcactacaatggaccattctaggatttattatcaaaacgacacctacgtactgttttttaatacagcatgtgttctgataatgttgtttatgggatcaatagtatcttggagctgtcattggtcagtttgattgtttgatcctgattgaccttttctgcccaagagcagaccttgtgttgagattatgttttcaacatgcctgtgttcaggctctcccatttcaaaatactccatggaaaacttctttaactgaaatatagcagtcttgtcatattcttaacttactctaaaaatgtacagtagcaggagctcagggtcagaatatgaattcagtttttctgtgttcacatattgtagttaaggaatatctccttgtatgtgaagttataagaaatgttacctggatattttggacaaattgtatacctagttttaaaaaataaataataaaaaatattctttagtttgaaagcaaatgatggacttttgttagtaatgtttgattacttgtttgttttttttttttttttttgtagggagcttggaaatgtgtggggaaattgatttcattaattcattcactaatttttaaacatgtatacctttattaagcacatgtgcacctttattaagcacatgtgcaattccaggcacctgggttaggcaccagtaattacattaaagaaaaaaatcccaacttaccaaacaccaccactataaaaataccaactacctctttgtgaaaaggtaattagtataaataaaggatctgcttaaattccaacaaataagagtaagtaggaagttgattgctactgggaaactatttcacttatacgtattcaacttctaaacagttactgtggctacagatacaaagaatgtgattatttctgattttgttgccaggtgagaattcgatctttatttttaaagcccttaggggcaacagagcttgtttgtttcttggctattttagtttgtaaattctatcagcaaatctgcatactaagtgcaccttaattatttgattctgactaaaaatgactaagattttgttgtcattcttcccttctcttcttccacttgccatttcctctttctcctttttcccttcttccttcatcttctccaactactataacttaccagttagaggaagtatcaggcattaagtgtgcaagaagtactaccctgagatttttgcataggttaattctgctaaccaacacaatgaccggaggtaactgctgctgttagcctgttttacagatgaggaaatgaaacaccaagagttgaatctgcccaaactgcacatgggattggcttagttgtttattttccatactgtgtgaggaaagactttgacttatgacatagatgaaatcaagggagtttctctttatctaggtttacttgttagccaatgaaagtgcttttaaacttgaacctctctaaatatttattattgtctgctgacctctttcattgagtaattcactgaatagaaaaatttaacgcttaagccaagcagagtcattgggtatgtaaatatggcaagtcatagtatttgaaaatagtgaaagactatgttcacttgggatttggtaggacttttaaaaataaaaataatagtagtaagcagcaacagactgtaatacaaactaggaggcatgaagattgtagtgctgttggttattatttgatagatgagcactcttgaacacagtttaatccaatttacttagagtttatatgatattttttgtcatctaagaagcattgaaaaaaatgacagtatgtccaaaattttcagaaaaatcttaaattgtggttctcagggaaacctgtggtttttctcacatgtaaaataagtacaatttaaataataaggtaattgcataatttccctattatgtaattatataattacataataataatgtaacaatgtatacataatgcaacaatttaaacaaaattggagctcaaaaaataattctgaaagaatgaatgagtctataaaatttggtgaatgtacttggctgaatttggataatttaagcccatataaattctacttgtcacaaaaataaattttaaattactagaagtgttattcttgcctttgctcttgaggaaagaacttaaaagttatgggatagcaaagtgggagatgcagaattatgagataatattacttgaattatgtaaattgtttatgtaatctgaatattagcttacttcctaacttttcttaaatttactggtcgccctctgtgacttcaggtagcagataaaaaaacagccctaaagctaaggagagaaggaagcctgcagtgtgggaagggaagccattaaaactttcctcaaagaacagtggcagctatattttgcagagtgctgggaaatggttattatcacatctctgtgctttctggaggttaaaacatttgacagcatgaagtccgattatatataaatttacctaaaagttagaagaaaagttgtattgagaattgagagacaacagagaaggcttggttgattcaaaatttctactagcttcaaaggccatattatctgaaattaattctcttagttattattccttcattgtatattctccatctcagtttagtgtattaaactgcttcatactaaagagtttgcgatacctccaattaacttttgcagtatttccaattagcttttcccctgaaaggaaagaagatgaagaataggctagagaaggaaaggaagtggccccagaaaggttaggtataaggtggtaaggatggaggtttcctgctcaagtccttgctccggcgtcactgtccccatgaagcctaccatgaacacctatgtatattatcctcatatgtatactgcatccagccccttcctcttgcatttccactctcatgtctttatccagagctacctcttcctgtagtatctattgcttcataacatattatatcattttgttatatatcatgtttattgcttattacttgtatctgtcagctaaaatataagctttatgaggacagggatctttacctcttttgttcattgatatattaaaagtgcttagaaaagtgcttggacataataggcatccaaatatttgtggtaaaactgttccataagaaaaaaagaaaaagaaaaagggtagccccacattcccaaagatgtaaatagagtcctaagtactttgaataattcaaaggaattcagagtgaaatttttaaaagaagattattatttccttccatgtactactgtttaatttctatttcagtccccactggggagcattgacactggtcatttcaggaagtaaagctttgatgataagggagcttattttaataaagagagagaaaggaaaggaccaatgcattgacccatggttagggggtttctgaggaaatggctgttcccctgttttatgcagagggactgtggattctgcttgtaccttgtttatttatgggttactagagattggtgagtgtttcaaataaacagagtttattacagaaatttatgtgatttgatttattccaattggaagaaacagaatggtgaaacatgaataaatttctacttattgtatctttaattagaatattctgtcagagtctccaaaattttaatctatagatcagtgttgtttcaaaataaaatgttaatagcaaaatgacaaaacataaggtatccatatccgtcaaactatttatcccattcctaagaatttgttctgtttttacatagaagtgtaagaagctataaagatattcataacattttttatacttgtggaaaaaataaaaacatctaactacctaccaagacttcaatatgtctacaatgcaattttatgcagccatggtatagaagtataattatgatatgaaaagatatccatcaaatattcactcaaatgggttttaaagcagtatgttctatatataagtatattcaagcatgaacaacttgaaaattataatagcagtgattatctcaggatagtggaggcttattttctctttttagtttttcctttcctgtactttatatatatttttacaattagaaattagaatgcagaaaatatatagtagcatttatcagaggataagacaatgtttgtatattacgttttcataattttttgatatctcactgacttttggtattaaaaagacttgaggtcttcgaagagttgtgttgcttttgtttaacagctgtttatgtttggaaaaagggagaagaatttaatattttatgtacagtgctataattgtttgagtagacatggggagtgctatattcactgggaatatgtatagtactttaactgcttagaatatacttttgtacactttatctctttactgttgtgaaaggtgaattatctgttgcttccacttcagaaaagagaggttttgtttgtttgtttgttcgcttgtttgttagctgagtcaggatctggctctgttgcccaggctgaaatgcagtggcaagatcacgcctcactgaggcctcaactcccgaggctcaagcaatattctcccacctcagcctcccaagtagctgggactacagacttgcgccaccacacctgcctaattttttttttatttctaggagagaagaggtcttggtatgtcgcccaggctgttctcaaattcctgagctcaacggatcctcccacctgggcttcccaaagtgctgggataacaggcatgagccaacctgcccagccagaaaagagagattttaatgcttatgtgctttatgtgatttgctccggttcatttagctggtaaagcctgggctctgaaatgcagatctctgtgcttacagaaaacatgcttttaaaaaaaaagttatgaataaatgcaggcaaataaattataagctctgaaggacagaggatgtttttaagactatctgcatactaaggtatggatgtaagacataccaccatttggaatttttcccttgagcatacacagatatagtcatgagtggcagctgtgatagcacagcttctgaaggagagaaagcaactaaggactgccttgaaaatatttaaggagttatttgagctgctgtgttgcaagttcgcctaattagagtggctactttcctttgtattctcttggcaatgtacagggattccgatgaattggattgagagtaagaggttgacatccaagctccatgtatttttgtgaagttaacattggcaatgatatctggaacttagttcttttctacagttggccatgtgggtttttttatttacatacatttatgaggtacatgtgcaatttgttacatgcgtagtaggtggcagtgttttaaacaatggatttcacctctcctttgaatgcttgtttgagaaaagtaattcaaatcctatctaaataaatacatttatataatcatgacaacttttaaaaacaattataattttctttcactagtactgtgtatgttttgagctactgtgtttaataagctaaggatatatttgaagattttatcagtccacttggcatctcaaacttaatatgtttaaaaacatctcaaacttaatatgttgaaaacatagctcttgaccttgaccccttgtccgcctccaacaagtctttcccaattcagctactggtgacaacatccttttagttgcttagaccaaaaacctcagtgtcctccttgagtcctctcttttcacaccctgtgtccaatccatagcaaatcatgctgaatttacctttagaatatatatgagtttgaggcatttcttacctgctccacgggttcacgccattctcctgcctcagcctcccgagtagctgggactacaggcacccgccaccacgccaggctaattttttgtatttttagcagagagacggtttcaccgtgttagccaggatggtcttgatctcctgacctcgtgatctgtcagtccccgcctcccaaagtgctgggattacaggcatgagccaccgcgcccagcccaccaacacttcttacctgaatgttggcagcagcctcctaactggtctccctcctctgtcttgtacccctttagtctattttcaatgcagtagccaggtgaatccctttaacctagagcagtttatatcaccactcatgtcacaagtgctcaagcccttcacctctttcaagtaaatggcagttatcccaacgtccaaccaggccaagcactgtagcctcatgttacctctcctacccgttccctgatagctacttttccccctcctctgttccagccacattggcctctgctgtcctctgacaccccaggcatgctcctgccttgccctttgcacttgctcttccctctgcccagaacacaatctctctaaattgctcgtggcttactctcggagctccttcagactttcttcaaatgccagcttctcagtgaggccttcctggctgctgtccttgagctctccactgctctactctgctttatttttctccaaagtataatacttaccattatatgttatttattaattttatgttgtgtctgttttcccagaatatatgtattgcaagaagtcagggatttttgtctgttttactaaagattgtacccctagtacccagaacaatgtctggcacctaatagggactcaacaaaacttgctaaacatctattaacccaaaagttatttaatttattatatttaatggcaggtattgtattgagcagtagagtactatgtactgttaatcttgctaaaatatacttaaatatatcattttaatttagggagggggatatgacatcatttctgctctctcactagaattttaggtacatgatgatgtttaaacaaatttgcccaaaaaaaccaaattctatttcagagataaagccattgtttatacaattattatacttatagtagctatttttttaacttcaacttttctcttctgtctttcttgtttttgttttccagaaaagaggcacagttagatgaagaaggacagtttcttgtcagaataatatatgatgactccaaaacttatgatttggttgctgctgcaagcaaagtcctcagtaagttgaatgcaactttccttctttggccaagttacacgtagaagctcacagaatgcatggttcaagatcacaacgcagggttacagaagtggtgcagagcatttgtacaacctgcatagttgtgtggtgggcatccacatatcatgttaggctcaggctatgccaagtcttatttttccttttgcaaattctttagagaatagaaaagagtaaatgtgctcttcttgttgttttttgagacagggtctggctctgtcacccaggctgcactgcagtagtggcccaactccggctcactgcatcctctgcctgccaggctcaagtgatcctcccatctcagcctcccaagtaactgggactacaggcacgcaccaccacgcccagctaattttttgtatctttggtagagacgaggtttcatcatgttgtccaggttggtcttgaactcctgagctcaagtgatctacctggctcagcctccgaaagtgctgtgattgcaggtgtgagcctccacgccaggcccagtcctttgtctcccccaacagaaagccatgtattcaggaaggaaagagaattattgatacttaatgtaacaacatcagttgtggtgtcaagaaaacggtagttattcaagtataatatgtgtttctccaaatctcttttgtagtcacaagttatattaactattggtaaaagaaacatgaaactgagatctaccacagataaatatctttctgaagaaggcaaagttttaaaaatttcatggagaagaagttgttctcaaagtagtatctattattcccacagtgcttaatttttaactgggctatagtttggatacaatagaatgaagcttttagctttgccacatataactaggaaagcaaacactatctatagtagaataaaaattgttttaaaagattggtaaatgtttaatattaacaagaaaaatatctagcctccagcaatcaaaattgaaacaaacatgaaataactttttttattatcaatttggcagtcttaaaaatggaaatatctagtgtaatgatggagtacagttaatgggaaatcacatacattttaaatgtgatggtagttaagacaacttttttgagaacaattttgcctcatgaaagccttttaaaaaaatattaaaaccttcagtaatttttcctaaataaattattagatctctttccattaagatttatgtatgtgttttcatgtcagagttccatatattatcaaaaactgaaaaaaagcctacattttcaataagaagggattggttaaataaattattgcatccatatgttgaataagatagcaattaaaactgatacacagcactttgagaggccgaggtgggtggatcacttgaggccaagagttcgagaccatcctggccaacatggtgaaaccccctctctactaaaaatacaaaaattatccaggtgtggtggtgggttcctgtggtcccagctactcaggaggctgaggcaggagaatggcctgaacccgggaggtggaggttgcagcgagccgagatcctaccagtgcactacagcctgggcgacaaagtgagactctgtctcaaaaaactaaaaaaaatgtgatacagaaaatttaagttttaggaaatattaatgattgtttattaagaaaaaagcaggacaccagggtacatgttatatgtaatcaagttattaaatatacatatttatataaagacttttgtatcaaaatattgtcatgtgcattcttgatgattttaaaaatctgtgttttttggaaaaaagaagtagtatatcaaatatatgctttaaaatggccaaaattaagtacagggtgagtatctcttgtctaaaactcttgagaccagaagtgtttaggctttcagattttttttggattttggaatacttgcatatccataagaagatatcttgaggatgggattcaagtcgaaacataaaattcacttatgtttcatgtacaccttatagacataggctgaaggcaattttgcacaatattttaaatgattttctgcatgaaacaacattttgactgcaatccattacacgagttcaggtgtagaattttccacttgtagtgtcacgttggtgaccaaaaagtttcaggttcttgagtatttagaatttcagattttcagattaggtatgctccacttataatttgtaatagaagctgaaaaactggttgctttgcttgtaaatgcaaatgtacaccattaacatgtttatacgttgtcttctctgatttcattgtattgtcctggcgggatttttttcatatgatctatgcttgccatgcacaaaaattgaagacattttacattacttaataaacacttatcttcattttttctattaacaatatttcacctattatatgctttttttcccctcttgaatttgtaaaatagatctcaatgctggagaaatcctccaaatgtttgggaagatgtttttcgtcttttgccaagaatctggttatgatacaatcttgcgtgtcctgggctctaatgtcagagaatttctacaggtaagcaatttgaggtcctatagttaaaagttctgtgtttataactctcaaatatagactctagaatacttttgttcactcagctgtacaagagtgtcttgcttctgaaatggaatcgtagtcacctttttctaattcacataaaatcatcgttattggagcgtctcgaatacattttagcattatattttttctttaacttctggttgctgatactgaatatgcaagttgtaaattaatgttccctgaagaactccaggtggtcttttgtgatctgttcaactgccctttttttggggtaatggctctatatcctagtgattgtggttttatgtgttagacatttaatatggccttattttctatttacaaaacattcctagtttgtagatataatcgagcaatgtatcagtatttatgaagttctacctggagctcaatgtttaggaaaaagtagtagggttttcaggtgttctgtcaccaaaacatacttaagatccattatcattagttaaatattaattaatctactgtacgagggaaaataggaaacagtccaaagtcagtttcaggtgaaaaagttaaataatgcaatcacaggcctttgtcttacattcttgttaaaattaccttaaaagattgtactagtaaattacacattagatgagagactatttctggattgactatactattttaagcattgacatttgtgagaccctcttcttgaaatgtgttaacattgaaaattatatagttgtttgcaaaggatatttctaaactggctgctttcagcagccagatcttgctggaaaatgatgtcagtgcaatactagctgaaccgaagcccagttttgagggaatgtaaactactttcaatccagctgcattattgatttaacagccaaaataagaactttagtgtttaatcaaaatgtctgttgtttacatagtgacatttttcttataaacttaaaacagcattaaatcaagttggaaactggtttgcaatctcctgccatggatttactaaactactggtgtcaaaaaaagctgccacttccaaatgaagtagctgccaagagatatttaaataaaattgaacaggcagcatttaatgggattattttaaatggattaaaatttgatacttaaatgttttgggggattttgggtttttgaatacatatttcactttttagtacttttgttggccactatcaacttatagcaaagtttcaactttcagttgttctgacttataactctctctctcaatgcccatgtttacataacaaaacaaagattcaagtggttttattaattccttttttttttttttaacctctactcattgtgaccatctgctaagcttgttatggcacagtaagagagcaagcggccttttaggtgtgtttctctgtattccagagctgctttatccaataggacagccactagtgcatgaggctactcagcatttaaaatgagatgtgcaaactggggagtggctcacacctgtagtcccagctacttggaggctgagatgggaggatcacttgagcctgggagatggaggctgcagtgagtgagctgtgatcacatcactgcactccagcctgggtgacagagtgagaccctgtctctacatacatacatacatgtgtacatacatacatacacacaacaaagtgcaatgtgctgcaagtgtaaaatatacaccagatgtcaaagacagtacaaaaagaataaaagatggctcattcacaattttatattgattgatttcatgttaaaatgttaatattttggatatatttggttatataaaatgtagttaacatagctttaaattatacacaattttattttatttctctttcaacgtgagagtgaaaaatgaagaaactagaaagttagaatactgtagttttcatcaatattttacattatgattcagttcttttattttctcctggttttgaaattatacattttaagggcaaattgaatatgttaaaatactgcttttctaaaaagtagatatttatgttatcattaggctgattacacagaaattaaatggactttttctgtgtgactataaaacaaaatcattaactttcatacattgttttaacatgccagcacacatatattgacatttttattacgtaaattagtaaaatattctttatggtgacttcaactcttcactaaaaatttaaagactttctttctgtttcagtcctggttttaatcagtcacagcatctttagattctatttcccaaatactgagctttgggaattctgccacttttctctatttccccccacacttctttgggagagtctaccattatctagaggttgaatggattccctgcttctcttcatgactcctccaatctcttctccatcctataactctagtgctttttctgaaatgcaaatgtctctcgtcgtatcgttttcttgcttaaactctggagtaattttttattgctcactggaaactgtcaaaatatttaaaacaattgaaacctacatcctttctgcatctttcctctccctctcccccagtccagccaaacttaacctctttaagaaccttgtatttatcttgttcccgctatcctctcagcttttccactgctcttctctttgcctggagcatgtttccagcactttccccatagataaattctattaattctgcaggtaaaattacttctctgggaagacgccactcctctctccaagctctgccctatcctagtcacggtaactaacctctctcttattttcataggacactctatttccccagccacagtagttttcatactgcattatcattcccatttgatggactggaatgtaaacttcaggaagccagagatcatgtataatctcttaatgtttgtaccttcacagatgcaatctgtatatctgagaataaatgaatatcttttttaaaaaagtgaatatttgttgtttgtgcaaaagcagaaaacacacaataggaagcaaacacaccaatagatcaagctgaattatttgcctcaggataacccatttcgagtgagatcctgtaattttttttacggatgaatcatagattgaaatataaaagaagagacatacactagaccaatttccttttcaggtgaacatcctaaattactgtttattatttaatttacagggtacattgcttgtatctgttgacacttttaaaatggtcgttctgacatttccattttaagcttttagggaacactaaaatagctactgaaatcataacatgggagactatttgattatgccttagctgagcaactctgactcactcatcatagcaagcagaatttccttggaagttgcctgtccacagcctctcagttagatacattattaagaataggtctgtcttatatatgtatatacataccataccattgtttttacttttcttgaaataatgaaagaaaatttctaagtactagacacagcatataataggcaattaatgaaacagtctttaaataatagaattaattaattctgaagtatatgtgtctttataattatttggtccagcctgttttatcaggataatacctcttttgcttaaattttttattcgaggatactgtatagataatatctgtagcttagctccagaaaaatatttgttttctcacatggaggttatcatttccattcacagttgacttaacgaatactaacatatctttccccttgaaaggctttggtgccaatatccaattcatgaccctgcttatgcagtctctcctgtgcttacaaattcaagtttaaaaaatttgcattatgcgtattttaagccacactgagactttaacaaaaaaatagctagaagtcctaaatggataaataaaatataatgggatatatttaggataaataaaatttaggataaataatatttaggatatatttacgataaataaaatttatcctaaatggataaataaaatataaaatttaatggataataaaatataagaaatatttttagagaaaactttgtagaaatactcctcttctctaggcatttcacagtttagaattgattttttcttaaatcaccagtgaaagcatcaacttgtgggctgatgaaaaaagtaataatctttggcatttattctttggttgatttaataattgaaaatataatgtatcaaaaagagaaaaagaagacatttttaaaatttgatttttggatcttatatattttacctgggtatattgttttaaagacaagaccatatttcagtaagaattttgtctagtttttccacttttttattcataaattgacaataaaatgtgtggttccatgctattgctatagtcaatgtctttttttgcgttttttaatgttttattattattattattattgagacggagtcttgctctgtcgcccaggctggagtgcagtggcgcagtctcggctcactgcaaactccgcctcccgggttcacgccattctactgcctcagccgcccgagtagctgggactacaggcgcccgccaccacacccagctgatttctttttcttttattttgtattttttagtagagagggggtttcaccgtgttagccagaatggtctcgatctcctgacctcgtgatccgcccgcctcggcctcccaaagtgctgggattacaggcatgggccagagcgcctggctgctatagtcaatttctatctgaagcttctagtgtactgatgaaaagactgcaaagaatacatgggatttgaaagcttcataagaaaatagctgataaggaatgttcagtttaatgttatttctaccttaatccacgctcacctctactctctaatgtcctattgcattatggcacattctattttccctaaattactgcaacagtctctcccatctcacatgcatttctgtagtatgattttgcctcttccttgcgggaggtaaaattctcttttccttgaatctgggttggctttagtgactatttaaccaatcgaatggggcagaagtgagatatttaaacttcctaggctagagtacaggaagtcttggtttccttcagggtatcttggaacagttgctgttgcgatggtacctctagaaacccagacacatgaaatgagaagcacaagccacatggagaggccacgtgtagactggcagatagcagttctagctgggctctcagcaaagagctggaaataactaccagccatttgattgatccatcttggaaaaccagcctgctccggcattctgataatttcagcccagtttccatctgattccgtcccaagggtagaactttctaatttagccagacaacccacagaaccatgaaaaataacaaataaattattaaagttgtttgacatacagctatggataactagaccactactctgtgcattatttttccctttatattttatgtctgtgttaatatgtgtgtatatgcttgtacaatgagtcaagagctttgagaaagctgtatttgataagataatctattacccctgggaataggagccatgtcagtcccaaacagggctaccaattcaatttcgatggtattacattattattacattatattgtttttacctcccctacaaatttacagagttaaaatgcaattaaaatgagcagcgaaggctgccaggttgactatgaaaatatacgtgggcaaatgcaattttagagaacagttaggatttaaattatgacctaatttaaattagaactcaggtgaatagttagatcagcgttctttcattatttgctggagacactggcttcttcaactaaccttgatatgttgacagtttcagtcattcactcaactcagatatatttgagtttatcaactagcgcctctgttcagcctgccatgggattttcttcaattcctgttggctccaggttttgacttattaaatacaacattgtgatttggccaccaggaacaatctgagattgatgactgatctaattcttaaatgtttgtgcaaagggttattttaggaaatatgaggattttcctgaacagctgtaaaattctaatacttccctaaattatttatatttcttaagaaaaaagagcaccattcactttatttttaactttggaattttaaaaaagagctgttttctcagcatccacaacgccaatttctataatccaataataaaaatagttttattttttaaaaacttatgaaggaagataagaagtattccagaattgtaaggcttttcagtttgaataactggtatatattttcataatttttcaaaatattgattaattgttacatgtagtattatatagactggatcttttttaacatgagtttaaaagcaatagaataagagaaatattttaactgtttttctttaattaaaatatttccttggagaggatggtaatgataaattgatatagctttaacgctatttccatttaaataattttagtgactctggtacagtttctttttaaatagagattttcaatgtttcttttagaaaagaatctctatatcttttcagttgaaaagctatttaattctcaagaagcagctccaggaagaaaaggcaggaaaagtattatgaaagcattcacttcctactccaatctcatgctatttactttggtgtttctcatcatctagggtttgatgttccattttacttaggtcgactttgtttaaatgttttatcttcaaattccaaaatgacttttttcttataaaacttaacaaaatattttttaaattacatgactctcattaaagaatgttggtgttggtcctatttttcagaggtgtgagggatagaaagaaaggaaatactatacctcatcctccttcattgaaaaacaaaaagaggtttgcaatgactggttttaaagatttcttgcagatctaaactgcagtaatattctcaacacagacaactcccttctccccatccactaaaacaaggattcttggatactgaaaatgtttttctttaaaacgttcaaggcaaggtcttacccatttctgtggatcctttaaaaaatttaattagatgtccttgaaacaggaaaatcaggtagttgacttctggggactttgcccctgtaattatgtaagaacttatttttggcatgcatattacaaaaagaaaatgtgcatttattttgaaacatcccaagatctttaaaaatgtgacactttattactcaaaggaatgataaattgtcttttgttttctaaatctgtgaagtgtactatgtctgaaattccagtagagtaccccagaataccagaactaatttttcttttataaatgataaatgcaaggtgataaaataaactagactgacagggagcagaattcctgagtagaaaaaccacattcatttgcttgtagaaaaacaataaaatgatattagaacattaagaaatgaaattattaaattaaaacctttaggtatctcaagatatcaaaatagatgaatggacctactctctatatttttcctgttttttgattttatgaagcctagaagaatgaatcaaagcatatttcagatttacatcattgtttcctgggaatctacttgtgctgcaatgtaagagtttacattttttcagtgtcttttttactttcatacatatggacatacttctttgcaattggccacacagctctttactttctgtaagtgcttctgtgggtatatttagaaataacacagaatatcagttttgatatgaaactcttattccccagaatacattgttagagcaatgtggatgaactatcatctttgtttagatagcattatcaaatgtagaaagggttttctcttggccattgtaagaatctttttgtagcaaaaaaaaaaaattgtagcctgtatatgaggatgacacatttattagcaatataagtgtacttaaatgaaaataacttttaatcattaatctcatttcttgtaatagtctggctgtggtaattactttaaattttgaaagagtaaagccaagtaaggaaggttgtaactcaagaaatcccaagagtattttttatattagatactatctaaagaaaatcaatattacattaagtggtgttcaatcttttatgattcaggagagcactttacttgttcaattaactaatagtaaattcaataacacagtaaatctctggagagttggttactgcaaaaagacagaaaaggtgaacattctcatttggtgtttttggtatcctttggtgagggtgcagtgcctatctttagtgactcaggaagtactgacttggatgattgtgtccactctctgacttgccccagcataagtggtgccagtgacataagtggtgcaagtcgttattgccttatgccatctgcttgagtgaaagtagaaatgttttaataatccagtaaaaaagatgagtatgaaaatgatataagcacattggtacattgatttatgaaatatgtaagcattctgtatagaaaaaatattaaaatgcctttttgaagttattgtttggttcaatttccttttttttttttttttttttgaggcagaatctcactgtgtcgcccaggctggagtgcagtggtgagatctgggctcactgcaacctccacctcctgggttcaagcgattctcatgcctcagcctcccaagtagctgggactacaggcatgccccaccacgcctggctaatttttgtattttctttctttcttttttttttttttttttttttttttgagatggagtctcactctgtcgcccaggctggagtgcagtggcgagatttcggctcactgcaagctccacctcccgggttcatgccattctcctgcctcagcctcctgagtggctgggattacaggcacccaccgccacaccctgctaatttctttttttttctcttagtagagacggggtttcaccgtgttagccaggatggtcttgatctcctgaccttgtgatccgcccgccttggcctcccaaagtgctgggattacaggtgtgaggcaccgcgcctggccaatttttgtattttcagtagatgtggggtttcaccatgttggccaggctggttctcgaactcctgacctcaagtaatctgcctgcctccgcctcccaaagtgctgggattacaggtgtgagagcacgcctggcctcaatttcttttttaagtgagccaacaacacagtacctgggcctgactctattagaaacattttctaaatgcagccacaagctcaattttgactttgtgagaaatgcagataaaaataaaactctctcagtgattttttttttctcacccgattttctttcacaaaatgtttcacaacataagtagaagtataaggggtctgagagggctatgaagcagttctcaggtcgtcccttctaagggaagagtcctaatgagaatgattcatcattggaagaacctctcatactattcaaccaagtaaaacagttttaggactccggggtttgtaggttatatatacctcttcaatacttagtggctgccatattggattacttttacatggcaatagcagcctctagaggcaatccggatgaactgatgtttttgctaagaattagcttgactccatcaggtataattgtggggaaggaaacagtagatgcagacggttcaaaaagtcaccagatttatcgagttgaggaggtcattgaatcatttatctggattagattgtcaaacttcatgacctagctcaaatcacatcttcagtttgaagtatttttaactccattctttcagtctgaattgttggcttcctcatttgctcatcaaaagccactctacacatccatttgtgatataaaccatgagctgcttaatcctcatcatgcagatctgcatccaaacatctaccctgcacccaagcccacatgacacagtgtatgatatataatgcacatacaataacattatagagtgaatgcatgattgagtggatgtgtggaagggacagaaaattaatgctgtaagtgtcctgttagagtattgctcaaatgtggacacccgcggaatcatctcattctcaccgtagtttcctcccagtaatctcactggatttttctgtttttctaaattgacctctttgagacatttggaatgaaagccatagtttaattttggcatatctccagtactttcattttaggtatgttcttttatgcccatgacattttgaaactgttttgttgtttttcttttcttctctttaaaaataatcaccagttgtgaatagattactacttgcttggtgtatttgttttttattgctaccataacaaatgaccacaaacttaagtgcttaacacaaatttattaccctatggtttcataagttggaagtccattgcaggtcttactggactatattcagcgtgctgtgctggtgggacgggactgtgtttctttatgttggcttttggggataattgttttcttcctcattcaagtattgacagaattcagttccatgcagttatagggctgaggacccagtttccttgactgtcagcaggcagctgccctaaagtcctggagacctctctccagtccttcaacagtctcctacatctcagaaccagtcgcatggtgttgaatccttctcatactcccatctctttgaccttttgtcattgcacatctctctgtcaccatgtagcagggaaagcttcttgacttttaagtgcacagtcacccatgtgactaggttgggctcacctggataatccaggataatcttcccaactcaaggtccataaccctcatcacatctgcaaaatccctttcaccatgcgatacaacatattcacagggattaaggcaagggaatctttcagagacagttgttttttcagcctcgtctgaaatgtgctaagtgctttatatacatgtttaaagttatctccattttgccagaagaaataaagtcttagaaaaattgggcgaattggctaccttcctatgaaatgacagtcattatttaaacccatgtctacttgatcctaagtcatattgctcttaattcctataccatgctgtgctgtgtgtatatcctactatatatgtgcagcacacacacacacaccccaacatgttatgaactgagtgttatttgaaaaatcatcttgggccacataaaatgtatagcttacaccgtttcttctagtactctttacaccaattagttttgtatattagtaatctgagactcagggaaacgtggcatcttccaaactaatggcaaggctacaaaaacagaaaatatttattggccaatttattagttttcctagactttcaaaatgtagttatttcacagattagctatgaaactccaccttgatgatagcatactaaagaacatgaagaaattacattgttttagtttctaaaatagatttttaatttctaagatattagaatagttaaatagaaatcacaaaataatatgcttatgttttatatgcttataatttgggcatagttttttgagttgacaattaagttttagaattgcagtataaacagaagggaaatgtgtgagtcctttggccattccctgttgttgatcacaacacgtagaaacagctgccccaagctcttgtaaatgtatctttgccttagcccttaactatgtttttttctgttttagccatcctttttaatcccacttgtttatcttttcttaaaatgtactaactattcatagctgcagatatttttcttaattctactatcttagtttcattttctctgtggcacttgctttacagatatctcagtggagtgaaggatgtgctacatgtgctgcttcgctgatctgcccactagactccgatttgactcgttttcatatcttgctttcccagagtctgctgtcattgcgaaagcattgtttattggtctccctttcttctttgctgcagaaccttgatgctctgcacgaccaccttgctaccatctacccaggaatgcgtgcaccttcctttaggtgcactgatgcagaaaagggcaaaggactcattttgcactactactcagagagagaaggacttcaggatattgtcattggaatcatcaaaacagtggcacaacaaatccatggcactgaaatagacatgaaggtaacaaacagcaatggagacttctgaacacagatgacatctaaaaatattttaaatgacactctctaaatttacctgcagttatcactgttagtgctcttccctggaagtatatataagccaaaacagtggaaagaccagcaatcttctatatttggcctgggagtgcattatacaggatatttttttccttctggcagcagatttttctttctaattatatagtgttcaaggctacaagaaatttactttgcattccctgtgaacacacaccagctgggaagcagaaggatatgtgacgactgagctgtgggtttcagcatgcaaaatatccataatatggatagtcaaattctaaggcaatataaaattaagtattattttatagatcattttctctttgtcgatttttgtctgccccgaaatatagttggaatgtctaattttgtgaatgaaagtgtttgtttttgtttttgtttttaatcaagttacttggtgaaagaagccaggtctggtactttaaaaattgtgctgttattgataatacacactcttagttttgagtgatgatttcaaggtactgatagggcaaccgtacaacaaagagaaccactgtttctctttacctctggcccttacggtttctcccagtcaggctgctttttatgtgttcagcatgttcatacccaagagtcaattctcagtagctttaaacttgaggccaaagtggggagatagatacctttttccaacctttctttgtttatagaaaacctattagacagttctttcttatagatcatagatatattgtaacacacttgggaggtctaaaacccttaagtggagtattatccaaaattaaaatagtaacatttaaataaattagaaagatattccacatatttaatctagtaaagttatgttagagttcatggttttctttctttcagaagttggtgttagttcttacgtggcaccttttggtgatttccaggtgcatcgttagttttctacaaccattagtaatggcggaaaccacgattactgttgcaccaacctaatagaaagtaggactgtgtataacatggcattatcaaatgcagacatttaaaaattaaagccttgggtaaagtatcacaattcatccatgattgggaatctcactggtattcaatcaaaatagtatatacctcacatttccaatctttttttttttttgagacagagtctcactctgtctcccaggctggagtgcagtggcgcgatctccgctcactgcaagctccacctcccgggttcacgccattctcctgcctcagcctcccaagtagctgggactacaggcccccaccaccacgcccggctaatttttttgtatttttagtagagacggggtttcaccgtgttagccaggatggtctctctctcctgacctcatgatccgcccggctcggccttccaaagtgctgggattacaggcgtgagccaccgcgcccggccagtcttttgttcttgacattaaactaacagtatcgcctgggcgcagtggctcacgcctgtaatcctagcactttgggaggccaaggcggggggatcacgaggtcaggagattgagaccatcctggctaacacggtgaaaccccgtctctactaaaaatactaaaaaaatagccaggcgtggtggcgggcgcctataatcccagctactcgggaggctgaggcagaagaatcgcttgaacccgggaggcacaggttgcagtgagccgaaatttcgccactgcactccagtctggttgacagggtgagactccattatcaaaaaaatagagaaaaaaaaaaaaataaagcaaaacaaaacgaaaaacaaaaaaaaacacagcatctatactgagtgaacgtatatgcatattgtatgcactgttggttttatttttatttaaccagactgagaaagaggtaggttcgtagaaacttcagaaagaaacacaaattaggacacacttggaaactactattactgtggtattagaatctttggcatgggagattgatggctttagcaaactgtatgaaattcaagtatttacttaattatatggttcactttataaaatatttaaattctcttctgaccatttattcaagtgcttcaatatgaacttctgaaatatttgcattttataggtatattttatgtgtttaattttttcaaaagcactgttttgacttctcgagggattctcacattaagtttatcaggtccagagataccagacaatttgaaccacatggttaatactagatcatgtcataaagtgatataccaatgagaagttaaaaatatgattagaaaagctatttgttttgccagtttgatcaaagcaaaaaaattagaattgaataattaattcataagtttaggatacatataattcaatttctctagttaaatagaaacagagtagaacatcaaaagtaggcctgtcatttaaggttgactctcttgccttgtctatgagttagggaaatcaaccttaatgtggtaaaattttcaaattataaataaggatactaatatttaaccagtatagtaagttattctgacagtgaggtagtaacatcccagttttgctacaaaatatatctaaaagaatatatacaatagcatctatagttattgtgatttgtttttaaaaattgcagagaatgcgacagggtactcctgaaaaaaaaaaaagaaaagaaaaatgaacaacattttgtttttatttagctgtaactgaagaaatgttgtcccaaactttttctgttttgggtctggttgccgttgagatcgagttttccctttgtaagagggctcattgcttgcaatttcttaacccaaaaagaagaggaaaatctatactttaataatgtatttgcctgtgaataatactttagaaaagtaggatttttttacattatagatattagctcacaattacgattacttctttagaatgaattcctagatttgcaattaaatcaaagaatccacaaaattttaaggaatttttatgcctattgtcaatttatccttcagaaagattaatcaaaataccccctcatcagtggtatttgagatgcctctttttcagtaccttacccaatttaatattgtaacttttttttctttttttgagacagagtctcgttctgtcgcccaggctggaatgcaatggcatgatctcgtctcactacaacctctgcctccccaggttcaagcaattctactgcctcagcttcccgagtagctgggattataggcacccaccactgcgcctggctaatttttgtatttttagtagagatggggttttgccatgttggccaggctggtttcaaactcctgacctcaggtgacctgtccgccccaccctcccaaagtgctaggattacaggcgtgagccactgcacctggcctggtattgtaactttatgtatttgatagttgatggttaaaaatgacattgcatttatttttgaatatgaatctctatcattttatttcccattgttttaaaatagtattgtaatcttatttgatagtgctagcttgcttttagctggctttcaggttgttcactatacaagtgtgcttggctaagaaggcagagcccacaagtgctttttttttctaattctaccaaagagaccatataggatactggggaactgataccagatttgtaattttacaatgattattcaatcttcaaattttatagatcaaagtccagaaatattttcctattttagacatatggagtatttgcatatatgttttgaatttttgtaattaatcttctaaatgcagtattcataactcattttttatatttaggtatttttattaaactgaaatgaagacaattcatgccatttccccctttgatatccaggttattcagcaaagaaatgaagaatgtgatcatactcaatttttaattgaagaaaaagagtcaaaagaagaggatttttatgaagatcttgacagatttgaagaaaatggtacccaggaatcacgcatcagcccatatacattctgcaaagcttttccttttcatataatatttgaccgggacctagtggtcactcagtgtggcaatgctatatacagagttctcccccaggtaaaatgacagcatacttccttggggcctgagacaaaagcccatagaaatactattgttacaggcagccatccattcatttaaccctctgactatgtattaggtaatatgcagtttattgtaagttacacaaattgtttaattgtgaactaagtgtatttgagcataccacaactttccctaggacaactatttttttataataatcacatacagaaacagtaggaatgttatgtaagaatagtatacttgttacagtgaaaaaaaatgggtaactttttagtaacagtcacctttcacatgtttatttattcactgaataaatattcattggatatctaccatctgtaaatagctttaaaaatcaactattgatggtgttaagggaaaaggggggattttaaaaagaactaaaacacaaaatgatagagatgatgatggattcagtagaaaaagcatcaaaggaagcagttgggatgatgatgagaaactgctgttgacttctatgacagatccattggtaaaatcctttatgcttactctttttttcttaaatactaacttttggagttgtatatggcatacgtttagagatactttttgcttgtaattaaagagacttgaaaattcaggattagcccagttggatcaggtgaaatggaagcagagtagtgtgctgtcctggctctggtattgactctacctgtcccttactgtatgaccttgaacttattacttcacttctctcagcctgtttctctttgttctggcatgagaatagaaagcatatgaaaaatacttagttcattgtaagcaatcaatcagtgttacctattgttttcacttttagccctctagataaatattaagagagggtttgctcatgtttttggtattttaatttcatttcaagccatacacatttaacataacactgtacattttaaaagataaattttcattttttctccttctgaaaatgcattgtaaatttatgctagcttacatttgaatattagtcatctgaatccatatcagatttcatgttcttgtaactatttaatgtccatttaatcactgagttgtatagattgagatttgagttgatagttcagctaagtttcccttgaattataataattataattttctagttttaaatataactgagctgatttaatcaagcgattaatatcaaagtataaaaactattttaactgatgtgatactctttgctctctatctatattttagctccagcctgggaattgcagccttctgtctgtcttctcgctggttcgtcctcatattgatattagtttccatgggatcctttctcacatcaatactgtttttgtattgagaagcaaggtaatcaagatattatttcattaaatgtgagaaaggtatgtcacaaattagaagtattcaggggggaaaattatcacattctctgagaaagtatagagagataaaacccagacctcaaaggaagatctatttaaaaggcaataacattgatttttggtttgcctgaggagcagtggaactctatcaactgattaaaattaacagaggtaaattttagagactgtctttctgagacggccttgtttcacatcaaaaaaccaacatcttttactccctgtacagctacagtgccttattttagaaatcagaactaaaaaggatttttttttttggaacttcactcaaaaccacttatttattctttcttaaattgtctattgttcttagtagcgtttttgtgggtgaataaaagtgatgaaatattcacacagttgataatttagatagtgctgggatctcacggtttctgttcttgggatagatacagcaaaagtcattttcctagagtacccattgaatcctttctgtatttggaactgactgtttgcagctgctctatgaatacagggtgggagaatggggaggcttggcttattctttgagagtctggtaatgtatgttggaaccataccggaaaatcagggggataaaaaagattcacaaaagcttgaaataattatgtgaagagtagcacagttactgtcctgaattcagacgggacagtcacttttctgcagtgttgcaaggcagccactaggcttattacaggcagaactctgacagaaggccctctcctgttctaatgatgcacttattctgctttgtggtttggtgggaaatgagatatgcgtgtccttgttgctgaattcttaggtagggagaaaggcattcattaatggttgtatcttgccttttcaaggaaggattgttggatgtggagaaattagaatgtgaggatgaactgactgggactgagatcagctgcttacgtctcaagggtcaaatgatctacttacctgaagcagatagcatactttttctatgttcaccaaggtaatcatttttagattaattatagtggctatcagtacctatctttagctaacaaaggaatgccacaatattttattccattaaatttacatattctctgaggtgtaattagattttacagcccttgttgtgtattactttataacaaggataatcttatttaatatttgctaataaactcagaagaaatcacatactctatgttatttgccatgtcttaatacatttgtggagtgtttatgccattacgccatgggacaaataatctgcattaagctaattctatagttttggaccttcaaaataggcattatgtagaaaagtgattttttaaagcagctaataggatggcataataaatacattggtatatttgacatcaaaaattatcttttctatagtatgttagcaaaaaatctaaaaggtctctttctgggtttgaactattttaaattaaaaatatttacctactctaatccaaatacactgttccaaatatattattcaattaaaatgtatgtaaaatgtgatttttaataaacgtcagagaaaaataaaactatagattgttgttttccaatttaggaaagcattttactaggagatacatgggaattcagaaatataaaaattatgtctaaatttgcttcagaacaatagaaaagataactgtggggattattgtgagatgatattctgtgtattcataattttgtataaacaaagtgtaggtgcattatgtagtaacacagtcaagaaggcatgttttggtgagctattggttaaaaatttaatctgaattccaccatgatcacttttcacttaaaaatgtggtcttaaaatttctgaaaaatgtaatacactttgtaacaacctcctgttatattattactattgtattatacattacataacaataatatataaggccaaataagaataatatattgttggcacagtagttcacacctgtaatcccagcactttcggaggccgaggtgggtggatcacaaggtcaggagttcaagatcagcctggcaaacatggtgaaatcccatctctactaaaaatacaaaaattagccaggagtggtggtgggcacctgtaattgcagctactagggaggctgaggcaggagagtcgcttgaacctgggaggcagaggttgcagtgagccgagatcatgccactgcactcctgggcaacagagcaagacactgtctcaaaataataataataataataataataatatatcgttaatttttaagtacatttaagattaattaaatattatttaactatgacatataagaataatatatcagataatataaggatatggatgtcttttccctgagaaataaatatcaggaaaataaaagaaacaaaactaagaaacataaacgctttttaaaaaaattattaagctacattgatctaaagatgtcccatctgctatcagtaagtgttttcttcttctgcctcttcacaggttgagcttaggagaatgtcagcttctcattaggggcaatttctatttatggaaagaaaggttttcttcagaaataaaagcagaaaatttggagtttatttgttaattcccatatgcagacattggtcacccagtgagaaaattgcagattgtcctatgagacatgctcaggtgtgtaggaagatttgtactcacactacataaacaaagatcaagtaaaagtagttttacttgtaaaataattctaagatgattagtttgaatttagaaaaaacttaatggttcattaaaataatgatatagggcatttttagaaccacgagaccgttatgatttaagttttgtaactcagtatgagcatttttgaccattcatttttgaacgtacaatcatgttttttctctgctcatgggcaggtctcgtatacctttggccgatgatctggcttctttctagatgtgtctttttctgcaagtggatttacatatccattttaacgaaattaaaagacaccgtgtatttcattagtaaaatctttgattgttttattttctttataggtatgctaatttttgttttgctttatgaacattgctgctgagaatatattgcattaatccaaaattctgcaaagtcaccccttttaaagaattttggataggattaattcaaaattcttcaaattattaatcccagattctccaaagacataactaaattttttccttttagagtaattattattcagagtggccagaagtaatgactttgcattaaaaaaattcaagccaaagatataaccttatgccattttaaccagttaggttttgttgtcgttgttgttgttgtttgagatggagtctcgctctgtcacccagactggaatgcagtggcatgatctcagctcactgcagcctcctgctcccgggttcaagcaattctcctgcctcagcctcccgagtagctgggactacaggcgctagccaccacacccagctcatttttgtatttttggtagagacgcgtttcaccatgttagccaggctgatcttgaactcctggcctcaagtggtctgcccacctcgcctcccaaagtcctaggattacagatgtgagccactgtgcccagcctcaaagagtacatttttaaaaagcagttaactttttacttgtcagattatcactaaaataataaacattattatgttgttggaaaaatgacacaagttacaatgatgacgcataaaattcagcaggattgaataatgtttcaaataaatgagaaaaatttgtcaaagtaaaaagaagacatgagagccagaagtaagaatgacacatagttttagatacataaattacatgctgaggctgggtcataaacgtggttgggaatttttactcattgtttccaaaagggaaaaataagcagttacaagattcatagaatacagaaagcaaaatgaaagtttctcaaaagaagcattattattcttgagagagagaataaagatagatttttttcctctccttatgatgagaaaaaatttgagaataataaattacagcctgtgttaaatacctcaacgtttatcatagagatgttttctacatgatcgtttcaatttagactgatggcaccaaaaagtgcaacctggcaaaaatgcatctcaagttcactgctttttggtagatgcttaaatatctaagagaataaactcacaatcttcgttcaattctccataattctattgtcttcagcctgatgttttgaatggtaggaggtggcaggatcagattccttgacagaaatcgggattgcattgtcatgtatataagttgagactgatcttgcctcatttctccatatgacagtgtcatgaacctggacgatttgacaaggagagggctgtatctaagtgacatccctctgcatgatgccacgcgcgatcttgttcttttgggagaacaatttagagaggaatacaaactcacccaagaactggaaatcctcactgacaggctacagctcacgttaagagccctggaagatgaaaagaaaaagacagacacgtaagaatgtaacgcttggagcactactgttattcataacataatgtgactctactatatttaagtttgagaaccagactaaaaagccatgtgacctgtaatagctctggtgtagtaaataaaatctttcacattgcttttaaaaagaaattatgcttaaggaaataaaccagtcttaatggtggtggaaatatgtctgctatttttagaagccaagttggaataatataggccaaaatatcttttggaaaatcatgagaataactcaaattcaaatttagttcaaaaattgaagtttaactatcatttattcctgcattctttcatacaagagttatatattgaccatcttcagtatgctgggggctgccgcgtgcagagagctgctctgcacaatgaacttaaccactggccattacatgtttaaaaatttattttctgggaccttgaatttaggattagaaagaaatgaatctgacaaattgtaatattatatgtaatgacaacaattacatctatagtgacatacattagcaaaaatatcaaaatataaaacatttctatgagtggtggattcaattatgaaatattgagcaaggacatgaaagataatacttgattttcaagaaatgtatttaagtaagtacatagcatgcatactacttggccttgctttcatatgctaattaaacgcacatcactgacatttataagctattttacccaggttcttatgtgttcgttttttaatgtttatataaacatttggcggagcttctaagaccttaggactaacgttcaaagtcacatgggtttgtaggtttgagttactcaatattctgttctggctgtttgtattagaaaatcatctaggtttcattttttttgtattgtgactcaatttgctaatatctacattcatgataaatagataaataaccagcactataaataacatagcctttaaattatgacatatgcagatattctgtactgaaaaagctcttaattcacttcttttcctaaattgtcagcttaagcagagtattagcttctcttcctagaccaggagtccaaaactgggagttgctgggagttaaacagcggccttgtctttaatacgagtagctgataagtacttattacagaactacttctttgtttggattccccaaggtgggtttcacattcaggaactatttgcaccatttcgagttactgtgcttcaaaaatccttatattattttttagattattagatttagaatttggtttttgtagatatttgggtttcaaggtgatgtcattagaaaccatttactattaattttctttaaagctaagtagttttactgttcatacttactattcaaatatagctttaatatttcataaaacattcaatgtttaaaagttgaaaatgaaagaccggagaaattctactatgactaggaaaaacattgagagctcagctccattttgcatatttaaacttcccacatatgcccttttgctttagagcaaaaggcaggaagaaaaaggcaggaaggcttcatttgttcctcttcagtcttccaatccagagcccataggtctagtttctgcttctttccctctaaattcaccagctgtcatcctcctcctgtgtgctcacatttgtcccttagcatgatcccatagtagtctcagttgtacctaaagaaatacaataatttattttctagaccaacttcctctggttttatcagtttcttctatggaggagtgaggcatgaatgagactggagagaaattctgcttcttttaatattacttaccaaaaatagagacatatttcttattctaagaggcaaacctgtttccattattgtgctattcataccatgttttaggtgctggtaatgacagtcttcatactgtgactatcgtaatagcagggtcagaatacaggactacaaatgaaaactttgattttctattaccagtctttttgttttgtctgtttgcttggcttattttgatttggtttgaactagtttgggcttgcggatgtcttatgtgattaggatgaacaaataatttatgttttctgtaaatccttgcttataaatacagctaatatttgatgctaattttagaggatgtcctgctagaatccaggcctttaaagtacaaacgacactgatgctgtgtgaaaaggacagcagaagcactaaaggctttcccagtatttcttacagtggctttctgctgatcccactgaacagattgctgtattctgtccttcctccgtctgttgccaatgagctgcggcacaagcgtccagtgcctgccaaaagatatgacaatgtgaccatcctctttagtggcattgtgggcttcaatgctttctgtagcaagcatgcatctggagaaggagccatgaagatcgtcaacctcctcaacgacctctacaccagatttgacacactgactgattcccggaaaaacccatttgtttataaggcaagtgttctttatcgctgactgcagagctatccagaggctggcgttctgagactcccctccagaggccatgtcatcacagctctctgactccagcactgcagccttgagtacagtgagcctccatgtattcactctttaccatgttcttaaataattgcctcttgttataaaactgtctcttccttgtaaccacaatgaatgtttcatgaagtgggtgattccctggttaaaatgaaatgttcaccatcttatttgcacttaggctaacaaatctggacaggctgtttatcacatgtagtataaacatagcattcattttagtcctctgcaagagacatttttactgagatatataaatgctttgtacagtaaagaagtcatgaagcatgagaaggactcagatttgcgtttagataacatcaacttgaagaagataaacatttataaggcgtttttgccctttgtttcatttagaaataaatataatattggaaaaaagaagtcagtggaatattgctacataaaggcaagaatgttaagtaaaccatctctagatatctggggtaatataactacacaaggactatttattttatagtcattttctgaggtacactctagcatgtggtgagcacatcatacaaacaaatgattaatgaccgtgataaatcactgaacttgaaatggtggctctccatgccgtcaagccatcactgttttaggtagaaatgtaaaaaattattcttctgaattataaagttatctgaggtgagaaattaattgcttactaaaggaaaaataattctatgtctgtacctgcccgtcatcaaagaccccaagtgtccatcatgtgtgtaaattataagtaattgcaaggtttcattttgttggagttgaatatattagaattttaagagaattaaagggggagggaagcttaaagttgctggtagacttgaaaaaatatgttttttgttagggtaataaatgaaacagtcttttttatgctaaccgtgaacatctaaatatatgtactgttaggtggagactgttggtgacaagtatatgacagtgagtggtttaccagagccatgcattcaccatgcacgatccatctgccacctggccttggacatgatggaaattgctggccaggttcaagtagatggtgaatctgttcaggttagtaaatgaagtagatattgtaataatggtatgtaaacctttttggacaattgattcatatcgttgtccggaaaatcattaacgtgtataaagaagggcatcttgacaacaaagactatagcatttcatccagcccactgtactacattctttcatagacatggagatttatctacctgtttgaaattatctagtccgtttcatgtactgaaagtcatggggatgagaaaaaaacctcttgtaccttctagtttattttttaaaacctctttcatgtctcatgtaagttactagattcacatctttgaaatcttcagacttcaaatgtttctcttgagataggatatttccctggggagatagagatttcatggagggcttttgaagttgtccataatatgcttgaaattcttatagacatctcttacgatgttatatgatgactctacattattctgtaatataaagtaagcaaaaattcatgtgttacaggaacagaaaaccaaacaccacatgttctcactcataagttggagctgaacaatgagaacacatggacacaaggaggggaacatcacacaccgggacctgttgggagtttgggggcaaggggagggagagcattaggacaaatacctaatacgtgcggggcttaaaacctagataatgggttgataggtgcagcaaaccaccatggcacatatatacctatgtaacaaacctgcaccttctgcacctgtatgccagaacttaaagtaaaataaaaaaaaaaaaattcatgtgttagtgatcaaaatgattgaagcaaagctttcttttttgcagataacaatagggatacacactggagaggtagttacaggtgtcataggacagcggatgcctcgatactgtctttttgggaatactgtcaacctcacaagccgaacagaaaccacaggagaaaagggaaaaataaatgtgtctgaatatacatacaggtgagagaaaatgtcttggtatttactgatttgcaaagaaaatgtgtctttgcatgtggtttaattctctgagagattttgttgctttaacagagttatcaccttcactcttccccactgcttgtagagttgtttactttttatttgagaagattgtgtcattatttccattttatatgatttcacatcatcttaggaaatcctgatatgatcattgtttctaaagctttgagttacctttcagtacaacttcagcatttgttcttgccatcttggtttataacatgatacatgtcaccttctctataaaacttgtgtatacttctctctctactccccttcccttgtcttttagatgtcttatgtctccagaaaattcagatccacaattccacttggagcacagaggcccagtgtccatgaagggcaaaaaagaaccaatgcaagtttggtttctatccagaaaaaatacaggaacagaggtatgactaatcaaagtgtaatttgcgtacttaagacagagtataagtatggaaaactaaagcaaaatcactgaaaatgtatttcatttgaaaagaattcttgctaacagaaattaacttctaagtaaagcagtggaaataattgaacattaatgagccaattacaatcataagtactttttaggggatactttagtgatttttgtcctctaatgaaatgaaaaccaacagactggattgagaaggctgctttttttcttgctgttgtggttgttttgctcttcctctgtagtctggctcaaaggtaagtgggctgtgaggggctcccctgacccctttcctcagctctctaagttggctctgagatcaccacagataagggctgtggttcatgggaggtttcttaaccatgaagcttaagatccttttaaggggcaggctatctttctatggagtgattggggaattttggaaatcctagtccctcatgtgtttctcctagatagatgagtgatttttaacttgctagaatctgattaattccttagggaagatttaagttctttctactactatggttatactccaggcagagcccatgtgctagaatggacttcagaacagtggcacatccaaagtggaatcacacctctcatagaggccttgcacacactaagatcatggctagcctcttcctagccttttgtaaggagtggcatcagaagcaagtttgatactttgttaccctgttgatgtgttgtttcctcatgggggataagactgcatgctcatatttctcttttagtgtgtataaactctctaaagatgcttttagggcataacaacttctaaagggaatagaatgccagggtttgaaatatttatcttctttcacctggtttaacattaaatcattttcctatgaggtggacatgcttattgatgttcttctgataaactaagccgtaattacctcaaacattggtcatcttagtcgtgcggtcctgtttttcccagaattatggtgggaatgatttacagaaactgtagatgtgaacgtggatcacactctcataaagagaaaaatatatttaattgatattataaacctcactatcactgtaaatcaatccctcttttcttctgcctatttaaggaaacaaagcaggatgatgactgaatcttggattatggggtgaagaggagtacagactaggttccagttttctcctaacacgtgccaagcccaggagcagttcttccctatggatacagattttcttttgtccttgtccattaccccaagactttcttctagatatatctctcactatccgttattcaaccttagctctgctttctattactttttaggctttagtatattatctaaagtttggcttttgatgtggatgatgtgagcttcatgtgtcttaaaatctactacaagcattacctaacatggtgatctgcaagtagtaggcacccaataaatatttgttgaatttagttaaatgaaactgaacagtgtttggccatgtgtatatttatatcatgtttaccaaatctgtttagtgttccacatatatgtatatgtatattttaatgactataatgtaataaagtttatatcatgttggtgtatatcattatagaaatcattttctaaaggagtgaattctaagttttaggggaaaaaatgcaatttattttcagactcccaaagtaagaattaacatatcatgctaagaaaatagtgactattttgaagtatgctacttccctttcagaaatatagaatacacgtttctgttattaaagtatttgattactaattcaaatcatatggcaattataattcttctaaaatgctatcatttgtaactgtatcccctgtattaaatctcattaaccacaggcagctgttacagaaagctgcattgtttcacattgagctgttacattagttcaggctaaatgttgggagctccaaccacatccaagaataaatctggaaacacactgctgggatactgctgttagagcccttcttggccttgtattcccagaaatgagctccctttccttagcttagaagaatgtgattatatccaggacatcatgttcagaaaacttagtttactttcagcatagaatgcattactgttggaataattggcctctagctcttaaatgtctctgataacttattaatatctatctttataaaatagagtgcaactacttttgtgtaaaaatgtttgcctttaaatttagtatttcatatcagcacatcgatatatgtataaatgttccatgttaatgtgtaaaagagtctgtaataaattatttttttcacgtgtctctatacagtttttatttcaataaaaatattaacattatttttcatttt

(The sequence listing continues in the following parts.)
